United States Patent Application Publication US 2022/0211063 A1 - sequence listing, part 26

SEQ ID NO: 58 - DNA, 2508837 bp, Penicillium roqueforti (residues 1,254,420-2,508,837 of 2,508,837)
  misc_feature (1216)..(6722): n is a, c, g, or t
  misc_feature (98486)..(98857): n is a, c, g, or t
  misc_feature (139973)..(140068): n is a, c, g, or t
  misc_feature (294298)..(294473): n is a, c, g, or t
  misc_feature (357308)..(357493): n is a, c, g, or t
  misc_feature (460841)..(460917): n is a, c, g, or t
  misc_feature (472433)..(472614): n is a, c, g, or t
  misc_feature (615584)..(615865): n is a, c, g, or t
  misc_feature (740253)..(740361): n is a, c, g, or t
  misc_feature (916195)..(916331): n is a, c, g, or t
  misc_feature (1075365)..(1075510): n is a, c, g, or t
  misc_feature (1089816)..(1208316): n is a, c, g, or t
  misc_feature (1219906)..(1219947): n is a, c, g, or t
  misc_feature (1222307)..(1222480): n is a, c, g, or t
  misc_feature (1321962)..(1322032): n is a, c, g, or t
  misc_feature (1378114)..(1378486): n is a, c, g, or t
  misc_feature (1383157)..(1383516): n is a, c, g, or t
  misc_feature (1417201)..(1417461): n is a, c, g, or t
  misc_feature (1457179)..(1457373): n is a, c, g, or t
  misc_feature (1553365)..(1553435): n is a, c, g, or t
  misc_feature (1556267)..(1556371): n is a, c, g, or t
  misc_feature (1567978)..(1568073): n is a, c, g, or t
  misc_feature (1711154)..(1716896): n is a, c, g, or t
  misc_feature (1761963)..(1762104): n is a, c, g, or t
  misc_feature (1945843)..(1945940): n is a, c, g, or t
  misc_feature (1956443)..(1956565): n is a, c, g, or t
  misc_feature (2133091)..(2133194): n is a, c, g, or t
  misc_feature (2256470)..(2256628): n is a, c, g, or t
  misc_feature (2267769)..(2267800): n is a, c, g, or t
  misc_feature (2288112)..(2288280): n is a, c, g, or t
  misc_feature (2341509)..(2341527): n is a, c, g, or t
  misc_feature (2431121)..(2431466): n is a, c, g, or t
  misc_feature (2438830)..(2439280): n is a, c, g, or t
  misc_feature (2445112)..(2445256): n is a, c, g, or t
  misc_feature (2482480)..(2482688): n is a, c, g, or t
  misc_feature (2508831)..(2508832): n is a, c, g, or t
  misc_feature (2508834)..(2508835): n is a, c, g, or t
tcggcgagtccaggccgtcgccgagatcatgcgaactgtgaaacatggttcagagatgcaggagggcgggaaagtcctgatctacgcctgggccctcgagcaaaagaacagccgtagaggttgggacaagggcgacgagcaagatcgaatggttccctgggttcgtaaaggtgatcaaccccagactttccatcgctactaccacctgtacgcggaaggcgagctggagcgcgacatcggcaatgctggcggtcgtgtgctagaatctgggtacgagaaagataactggtgggcgatcgcaacccccaaaacggctcatgacgtatgaaaatgtgatatgcgttccgagagccagcctcggagtcatggcacatcaattcgcacttgctggccccgccaaaatttctgcaaacaaaggaaaagaacgcaacaaacaccgaggggtagaaatcatctatacgattcactatccccacaaatcacgatatacctccaaccggcgctatgcaattcgtaacagaaaaatcacaaaagaaaagaaaaaaaaggcaggggaaactcaaggaaagacgtatagggcgtcatcgtcgtcgtcatttcatcctaaggcatggtccgggggggcatgccaaggtgatggcccatgaaatttggtgggggaatccccatctctggtggtcgtccaattccatagaactctctcgggggcggtggagccggtgcgtatgcagggacgcctgcagtgagctcttccagggagggaagttgaggtggaagtcctggcagatggcctgggattgcgcgtgaggaagatccctttctcggccgggatagagaggtgctggcacggcgggttctagtggttgggggatcgatggcagcactggagagagagaatggcaccacgcctgcgcgtcgagccatctcctgctctcccagctgccagtgcatggcctctgctgcacgccatgggatagccatttcctccgctaccttggaccacatttcggctttgaacctgccagacgagtgtgagattagtgaatttggtttcttgtcatccctatcccaaacctacctctcgtataaacgggctagtttgttcttcttatcttcatcccattcactgcggcgttccaagtagttctgataatggagacggcaactgatggcactgcggccggggagtcgtttgctgatatcctcccacttcatgccactgccacgcagttcgatgatcagggcgtcctcatctggcgaccatttggactgcttcttggctggagattcggacgtatgcgagggctgcaggcgcttggcagcacccgatggaccggacttggtcaagggtggcatcaccatggcagccgggcctggcatagtcatcatgggacccagaccgagtggtggccctatcgttctgggcgggtacccagtgttcaggccgggggcggcttcttcctcatcttggggcttgagtagcagtgagatatccactttgacaggaggcaatataggccgattttgtaacgcaatcatatgcgcggatgagcaccggtgaatagaacagagaacaaagcagcagggggatccccgactagaggggggaaggggataagaagagaaaagagggaaggtgctcgtggacccaagtctttcccaaaatatgacagaacgatccaacgttctccaaagtgttcttttttttttctcgaattgaattggatgaaatctccaggatatcagagaatagaagtgaggggaaggaagtatggaaattgaagaattcaaggattgtagaattggtacagaaaagggagaagaaggaaaaggacgatatgaagcattcaactcgaaggtgaaacgaatgcagaagtgacagctgatctaaacctatcttgaagcgaagggaggagaagaagagtcttagaccgttggggggtggactattaagggtaacggctgttacaaagtaaaaaatacttcaatatccactggttttaattaaagatgcggtcagttcccctggtctactctgggtgatcttcgtcatgctggtctggatttttagatcatccatcctggtccaagtcctcaggcttgcgatatcactggaatggatataaatagggcgactctcgagagctatcgactgcaaagtatatagacgggcaatgtttgatatgacctgcagagtttcatactaacccagagaaggaatgaggggcaacgttctatgggaccaaacggtatgtaccagagtccttaccataatgtaccaggttaaatgatggctaaagccgactaattaattcaaagtaatcccaatggggccactcctttgggtttgtgtttttatttcaaacttaaaaaagtcaaaattaatccagaaacattaaaaaaacattcaattagataataaatatataataaataatcccaattcaatttaaatccataaatcaagcccggggacccgcatcaccctttggttaaatgagaacggtcttctccggtccagagtccagcccgttgcaactaaaagttccagatctttaacggctttttgggaatatcttgaattccttgggggattgaccaggatatgtcacccttggaaccagtcggggaattttctgtgattattcacttccaaggttcttccccccttgctcttgtttgtggggcgttcccgactctcgggtgtccatgtgtttattccttctggtataagtaccttattaaagagagagagatatagaggtggtgggcttcgaagccgaatggaacattctataaggaaatatctatattttttttttttttctttaatgaatccaggacctgatgtctcgaatctggttctatacatctcatagatttaagattggtagggtaatttgctttccctcaggctaaggtcttagaactggctcttgaacgacggggcacgcgttcacgcatttccaagattaagggactggtgggtcgaattcaatttccacaatttccacaatttccacctttttgacagccaatttcccgtacaatgcaattctagtgcacgtgatgcctctggacccagaaaccgggcatcggcttggggaagtcttattccacggagtagacaatatagtactctaactatatcatacactctatctatgagtatatctttacttccattattctatccattaccacggacttccctatatgatactcccctttcttcactccgacgatcagtcttcctgaaacctccgttcagtcaatgcaccgaggatcagcaagctatccctcttcctgttcgtactttgtactcccgggcctcgaatcctgtctgtcaactttccaacccatcaggcaacaaaaaggcaaaggcaaaaaaaaaaaaaaaggaaaaaaggaaaaacagaaagtcgaacgtgtaagtggatcatgtacaacgttcgcaaggcgatcgttgcctcccttggcttcgttcggagccagcacagacatgacccgttcggtagctacggcttcatcgaccttatgatccgcttggagcaacgggggggctatccgtagaccaatgtctagattatatccgagggggaatgaccggtataatggggagaggtataaaagtaaaaggaattcaggccatgcttcgagggcctgggggtgggagggagagacaaaagatatgttaacagtcagacgcgggagggaagaagccacaagtgtgatgatacaggatgtcgccctactctaacggcgcacacaccgtatgtacagttgagggggcaggttcagccaaccatgaagaatgaacggggtggagtttcaaggaggggcaaatgtcggatcatcatgactatgacttaagtggtagcgaagagctggtggcgctgcgcggagtgtttctcttttctatttattgtcgcgatcaccctaaatatccgacacgcacccgttggacccggtttttttggtcgtttttgattcgaagctcattattttgccattggtatcatttcagatggatgcgagtgggtttctcttatatctcactatgtatgtacctaccactagccacatatgcactgtgaacggagaattaactgttccacttagatccgtaggatcatctgcttcagctccagtggcgcccaaccgtttgaattggggcagtgcgctcaacggtggatcttcggtagatggggaggaaccctgctgtcaacactccctacggagtacactattttgctatggatcatcgggggaggccatatttgttccgaaagtggatgtatctcaaatatgtacgtatactaacacaaagtacagagaggcacagagaagatcccgacaagagaaggagcacggtatagctttcggccggacctcttgatattccatggccaatcatcagcctggagatttctatttcatttggctccacatctgaaacagctgctgtgtggtcaagtcccttctagacactagacactttaggtggaacgcggttcatttgcacggagtatttctcctacacttgctccatatgttgtagtagacttaagattatcggtctcgaacattcttctgcaaaaaccgggggaacacggccagcaaggaaattggctgattccagcccgtttatggtcccattgggccctgggatctgactgggaagttcaccgagatatcctgggaagctgatttcagagatgcagtacatttttttcatctctctttgaatatgttctatgtgtgtgaacagcccgctatttatagatggtttctttgttgtggatgtaagtcggcttgggatctggtaaatggaacagctcaaagtctgtgaaggaacaaaataatcaagtgtaagtgggatgggggttgaatgaaagttgaatgaatgtctcgagaattcagtagagttcttgcctttctttgatcaccatatccctgattcattggttccatcatgcattcaaagaattcccaatcgatgccacattttccttggagatgagaacaatgaaaatcagttgcaatgcgagataaattagactgcgaccccctcaagtgagcaacagcttcacatattgattcatttcatattctatcatggccaaaactaaacaagtcccaaagaaagtcctagaggaagaggaagaggaggaagtcgaagcctcaacagcgcaaaggggaagatcagacgaagagaaaatgagagtgagtgtagccaacctctacatcaacaagtctaacaagagagatagaccgtcatccccaaacattggcatccagccttgcccaataagaccaccgtgggcttgcccaatgcccgggttgactgctatcgaaatgtcgtcttccaaatgcttctgcatatgccgattcttcacaattggctcatctggtatatgaaccaccatgcccctaggggttacgtttgcaagatgggtgaagatttccgcagatgccaagtttgcgaacttgccgaggtcttccaaagttattgggcaaatgaaactagaaattggatctatacctttagatatctagcaaggacgatcttacttaagtggaaaccaaacggcgagaattcggaacaagacccagcagagtactttgtgaaagtttacaatgccatcaaagagggcatcaggcctatgatgtatgttattctctccatattccccctacacgcagaagactgacttgagactccaggaaaggagacttcgaagatatgttcgaggtcggaatcatccagaggagagaatgtgctggggaaaacccctgtgccccaagatacaccccgagccagcaaccggtcatgctgctcccattttcagagcacaacacactccccgccaggcctactttgggcgatgtagtcaaacaatactttgaaaatgtagacgatctcggtacatgtccggactgtggaggcaagaagacatccaacgaccgaattggacgttttcctgagcttctcgtgatccagctcaaccgcgccaatgattttggccaaaagatccaaacccacgtatatctgaccgagcagttaaatatcgagacacggttcatggatgaacgctggggcaacgaacgaaaagtcgtccggtataaactgacctcgatggtcttgcattttggccagcatgtacaatcaggtcattacatgatcgctgtcaaaggtaaaggaggtcaatggtctatggcgaatgacactcaagtcaatgactgggaccccgaaggacccgagagcagcctggactatcccgctacctgttatctctttacataccgccggttacccacggaagacgaggcagagaaaatcccagatgacgaggccattcaggccgactccggtttatgctcggacgatgatgtgtttgagaatgttgatcctggcctaggattacctccggtccctgagaatactgtcgttaagatccctgagaacactgtctttgagaattctgtctttgagaagtctgtctttgggaattctatctttgggaactctgtctttgggagctctgtccctgagaactctgtccctgagtcaggcgccagtgtctggggagttgatcccaggacattggagaagttactggaggtgatcattcccaaggccgtcgatacctatatagcccgctcagcggatgcgaggcacaaggagtgggatcaatggtcgaaggaatgggcgaaggaatgggagaagagaagaacagccgaaggagcgaacacaacagccaaaggagcgaacacaacagccgaaggagcgaacaaatctgctatttgccctggttgcgacaaggatatggtcaattggcagaagcaacgaggaagacttcaggtaactttgactgaaaatcaggggaatggggaaaagatcctagacctcgaagttcaaggtctacactacaatcgactcaagaggaaggtgggcaaggaagccgataaggcagaagagtcagcaattaccaaggtgataaaaaaaaagttgaagagcacagcgaagggagatgaagagacggagacggagaaggggaagggaaaggccaagccaaaggtgaaggatacagcaaagggagatgaagagaaggggaagggaaaggccaagggaaaggcgaagacgaagggaaagaagaagtagaagttcaatatctcggagtttagttttttcttcagttttcaatttcaatttcaagtctcaggtttcttccctctttctaccacaaatggattccaattctcctcacatcttcattgatcgtttaatcgctgaattgtcacagccggcactgtcaaagactataaaaccactgatgctaacattgcactgtctgtttccaaatgacttcctccctgctcttgatatcctcgatcgcaaactagtacgtcggattgtacgctcagatcgatcttccacatcccagatccaagaggacattttcatcgtattatctacatcaattccgccttcacttcccggctcctcaatcccctcccaagaaaagggctatgaggttaggctgcgtgcctggaattgcagctgtcctacatttaccctgtctgcataccgagaccctcaactcctgcatgattcgacaaacaaacagaaccagttggcctactcatttggcggaaccttagctcgtggtacggctcgggtgtcgcctcctacctgcaaacatattctcgcctgtattctacatgcacggtgccctgagctgttcggggttgatggggatgacaggctcgccgtttccaaggaggaactggcaggctggtgtgctggttggggtggttgatttgcttggctcttgacacgtcaacgcaaatggatgtacgatgaattttacgcacttgtgtttgtccttgaccctgcggcaagctgctaagcgaccttatgaaacccatcctaggtatctgcagatgacaacaagtcctacagacccttgtccattccacatgagccatctgcccgtgtccggacaatcaatcgttcaaagtcggctggccccgaatggagacttgtcccggagctcttaagattgcgggatgattgtatgatagatacaccaatggcagtgttattactttacgagatagttgttgttcgctgtgcaaattagacagatctaaacataggatcttggccctgactatccaatgtacatgagatacaagaaaccccggtttaaatgtggtatgtttaactgattggattgataatcctttccggaagagaataaattaagaaaagtcccctagttcttcttcttgttcttgtcggagctatcctgctcctccttctgctcggcgtttggtgggccggccttcttagcatccttgtctcccttagttccattggcctcctggtcccgcttggtgtcactctcctcttgctgctgtcggttctggatcttgttatcgattaagtcgtggaaagccgtgatagcacgaatcaagctgctgatgtagatagccatcaactggtcattagtcttgacactcatggcccgtgccaactcgctgttctcgatctgcggctcctggccgctggtccgctgcgttgccggtggggtggacagattgggaaggaggttgaaaacatcctggaggttgcccagaatggcgtggttgacgggaagttccttgtcgagaactttttggaggtattgaccgatatcgcgtagccgcagatgcaatccttgaagcgactgcagctgcgacgtgatacgggtggaaagtgtgccgactgcgacgtccctgatgtctcggaggaggtgttccacgccaatctcctctgcttcttctgcctcgattatcgacggggtgtgcacaaatgtccgggaagttgttgttccatcctgcaagtaagaaaaaaaaaccccctggttagcgctgatggcctgatggacgcttcctcggattcaatgcaaactcacatctttgatttcatccacagcgaaataagcatctgtaggtacaccaacctcctttggttgtacatcaacaataaccagcaaggggttgggcgtgtatttcttgaagagctcattgatctccaaatccgaagcgcgcagcttgggacccgagtggtaccagccgactagcttctcgcgagcattgattttcttgaacatatccctcatcgactccacgaagttgtgatctaaaaaccacaccgatgggtctttttcatcttcctcgaacgggactagagagatagaacagatgtcaactcatctcttgtatgagtttaattcatcgaagcttgcacttaccagcaaaactgtttgatacccggacattatcgcccgagttctcacccagcagcacgcctacaacacgttttttggtaccctttgctgttctcccatagtgatctgcgacggagaggaggactaacggggcaaccgtcacggagcggttgacgagggatagcgtgtccgccgtggtggcaggcatcgtcaaagggagaaaaggtgaaaaggaatcgagaggtgtgaaggatgattaaaggtcgtagatcaaataaaatccaatgaaacagcaaatcaacgcgagacaggaggatgcggtggatggagagcgatgatgcacaggtgctcttgagagctctccgccacagctgcgccatcttgaggctggaggacttagtaagcggccaccttgcactttccccggtgaactgaggaaacttggactatggaggtgtatagaatgtatatgtatagaatatagaaaagagagagtagatagagaagacagagaatatagagaatatagttatagatactgaatgtcaattgtatcagcatctaacctacacatcgcctctacaaaatgtcttcaggccattttcccccattcccccattccctcgtgaagcccgtgctctccgaacctcgggagctaagttcctcgcgaatcttccctttccccatttctccgtttccccgtctacagcttttctcttcttcagaactctccccccttacaattcacaatggctcccatcactgaagatgccctttccggcctgaagaacactatccaccagctggaggcaaaggtgtccgagcttgagaaccgtctcgccaatggcggcaagcccaagtctgtcgccgaacagatgcgcatcatcctgatgggccctcccggtgcaggtatgcgattgaactataacgggaaaaagaaaagaaaaaaaaaccgatggatattaacagtttcaaccaggcaagggtactcaagccccgaaacttaaggaaaagttctgcgcgtgccacctggtgagtagaaagtttgcatgagtacagcatgagctcttcccgctgatacatttcctgaataggccaccggagacatgctgcggtcccaggtcgcgaagaagaccgatcttggaagggaagccaagaagatcatggaccagggtggtcttgtcagcgacgagatcatgatcaacatgatcaagagcgagctggacaacaactccgagtgcaagaacgggtgcgtacatctccatttccctcccaaattcattttcttccgaggcccggctagaattaacacgagagatgaacagtttcattctggatggtttcccccggacggttgcgcaggccgagcgtctcgatgacatgcttaccgcccgtgatcagaagctccaacacgccattgagttgcagattgacgactctctgctggtggctcgtatcaccggccgtttggtccaccctgcctctggccgctcgtaccacaagatcttcaacccgcccaaggatgacatgaaggacgacatctccggcgagccgttgatccagcgctccgatgataatgccgagaccctcaccaagcgtctgtctacttaccacgcccagaccacccccgttgtcgagtactacaagaagaccggtatctggcgcggcattgatgctagccaggagcctggccaggtctggaagagcattcttggagtcttccgccagtaagcgattctgttggattgattgcatttaaaaagggggatttgggaggtgatttgggacaatttaccggtccaggctccgtgatgcctaccttttttcctatttttttctttgggcatatccgaagtatggctggtgttctcgtccacatatagacgtgggtttatcccgttgaccgccatgtatagtagtagtatgtgtgtactttttgtgagtactctttgagtaccgaatacacaagaccggtacgcattcaattggatatgtatttggtaaatcttatattctgcagtctaattccttccgacaaggcaacacacgcggagatgtgtgtatttgcctcatactagtattgttcaaacttgccctggaactcatatctaaagttgtaggggatactcagtcgactcgatcttctgaggataggccaaaccaccctgctttcgcacctcatccatgacctccataatcacgatactctcttccaacggcatgccttcactctcgagcttgccatcgcggagacaacgagcaacctcatcagcctcccagtacatacccttaccattaccagggaacgggcactgaacctcacggatctcaccagcacccttcttgggaatgatacggtagctctctggccggaaaggtgggccgaacacctgaatctcacctttagtaccctgaatacggatggtaggaccagccgagcccttctcatcgggatcagcagagacgcgaatgttggtcatggctacaccgtgcgattgctgtgggtgcgggccattcgagggcgtacttgtcgggaaacttagaatcatggttgtacactcgtctgcaccggtgaggtggtaaggagtcatctgcgagagcacagtgggtggcctcctctggtctcgaggtagggtgtggtacagagtctggaagacccaggtcagagagtagatacccactagaagagcaatcagtcaatgttttctttctcttaagcctagaaaacctacaatccaggagagcaccaccggccaaatcagggttcaccatacggtgtgtggtaccccatttcgtctcaacatcatcaccgaagctcgtatcagccacgacacggaggacctcaccgatctcacccttctggatgagcgcgcgaatctgaacgctgagggggaaatagcgagtccaaacggcttccataaggaagagattcttcttgcgggcaatctcgatgaggatcttagtctgagcagcgttgacggtgaaggctttctcacagagaacattcttgcctgcctccagcgcgagtctggcattctggtagtggtgggagtgcggagtcgcgacgtagataacatcgacattggggtcggctacgagagtctcgtagtcaccgtatgcggagcagggggttgtgattcctcgagccgagatgaattgctcggccctttccttggatgaggacgaggcgacggccacgacttggtgggctacgtcagaggcatcgcggacattcgggtcgatgagaagatcatctgtgaatgctgttcggaatgggttaattcatgggttcttgtcttatacacccaggtatgtagaagtgaaatcttactctcggcgatccagccagtggctatcaatcagttagctttgttttgttccttttcggtaatttcataacaggatctcgagatgtcatacccatgataccccatcgaacaatgtgtggcgccatgatagtaaacttgaagacaagagtcaatacaagcgttcagattgaattaaaacaaagacaagtttacataggaatgaattccgaggggaaaacaagcgggggtggagcggggcagcggggtcgtgtaggatcctatctaatgtacaacatcctacgtggatcctccgtgggtgcaacgtggatgcaacgtgatatatagttacattttgtaagtagatggactcaattcgctaattaacgccaggaagatattccctatgcaatgcaataatcggaacatacaagatcattagatctcggtcttgatgcgcatcttctgacttggagattcagtgccctaggtatggttagctctctggatatctaacacgcccaaagaaactcacttcggcttttcgtttgcccagtacagagtcgggtgtgctggtccgtgcctggcgcgtcggtgcagggccctttgtcacttcggaataacagctggcatgatacacacgacttccgaccttggttgcgtcttgccagatccagtcctgcacatcttcagaccaggtcgattcgaatttctcctggcagatggggcatggagtgtttcggagagtggcatcgttcggggctcgaatccacggctttggcggctcttgcttcgtattgccatccgcgcctgcagctccctcggcggtggtttggggatctgcagcgccgttctcatcgccagcctcgcgggatttgatccagtcctattggagttagaaataaaactacaagggatacaagagatagacataccctttcgtcaacataccagctgcgattctgagcccgccgggaagactcggtcatgcgctgattggtcttgaagtgccagtccaagtgccgggccttcatttcctttccttcgtccgtggtcaagaaacgacggccgcaagttccacatcggtttggtcgggaatcataaagagagacaataagcccaaatcgagggatcttcatagatgcggtgctcatggggactccagaggatccattaggaggaatttgagtctgagacgaagctgatggtgtaggttgcattccatggggcaagataaacggcaaattagatctaccagaaactggtgttgaagtcgaaggcgtaagagatgggggtgtcggtccactaggtagaagcccacgtgccctcaaggccgcgataagaggattctccggtgctggtggaggagggccgctttggtgatattggggcatatgaggtagcgctgccggcatttgaggaggtggggtggactgttgacgcgaagcggtagctttgatcagctcggcgagagtgttatgatttaatagttgctgaaggggttgcgagactggttgcgctggtggtgtggggatttggggaggaacggacactgcggggccaccattcgtagcagcattagggccaaccgacggtggtcttgtggcagcaagggcagagacctgatcacggacaagtttcaactgatctggggcgagctgttgtttctgtagaattgcctgaagatccaccaatgctttcaagcgttgttgggagacaggattgaatggactgttcgcaaagtcaatctttgcagaagcgatcagagcatccacgtctcgattgaggtagctcaagtcgatatcctgtcgatgagtctggggaggtgtctgtgagaacccaattagcttcagatgtgacacacaacgaaagtagccttacagaattagaataaccattattgggatactggtggttttgtggaggccgagacatgttctggggtggtgtagagctgttggaccatccagtcggagtcccatttccacgattacgactgaggatgtccggttgggccctggcctgttgttgttgcaaagccgcagtgcgtgctttgatgagagcactctcgatgttgcgtgtaatgtcgggagggaagactgggcgtgtgtccaaggagcctggggccggttgcttccatgtgttgagcatctcatccagcttcctccgagtgtttccatcaaccagagtataaacattcataaatgtctggtacatgttccggccaaggaagagggtgtaggggcttccgacgttcttaacgatggagtcggctacatagagggctggaagcttctgcaggggtggtgtctacatactggttagtactcatcctgtactacgccaaaaaaaaacatcaggagcacctactgatcgaatgtggttctccaggacccgggatatggccattgcgtgttcggtattctctttggcgatgacagtcaaagtgcggatctggattccatcattggtggttaggtcctccaaggaactcttgtagtcctccgcaatttcgtccgaaatgagaccggacattatggcgatgtgggatgagtcgagggtgatctgggattttaaagatgtcgagagaagaaatcaatatcagggcgaagttcagcacgtggtcttgatttttttcctcctgctcctttcttccactgctcttgttccttcgagtgtgtctgtttcttttcttttcttctttttcttcttcttcacttcttcctttggggtggcttctgtctgtccttctttcctgtgactatcaagactgtcttcttttcttcttaatccttgtcctcgttccaaggaacaaattctcttggatcaacgcaaagatggagaaatagtcggaacttgtaaatgcttgctagctatcttcgcgagaattgagaaaacaatagtattcaaacacttgctctcagtccaatccaacccgtgaccttccagtgcccttgtatatctactttccagtcgaataatcgccgaggggtggtgatggaagggaagaaatgcgaggccgaaaagccgcggaccgcgaaaaaaccaagcagatgcggcgaaacaaaagagactaccaagatgggtaaatgcaagaaaacagcgctgtggaggagtgaagcaatggaaattgagagttgacaagaaaaggaaaaaaaaaaaaaagagagataagtgaaatagtgaagtggtgagtgttgaggtggtgaggtggaagcgccgaagagaaagggattgtgagatagagtcatgtgatcgtggaatgacgcattcaacttctcctcgacttggactgacttaccttccttcgtacattcaatttatttgaaagagatattattacatttttcaaatatgaagcttacacttgctaccctgctagttctaccgctggcactggccggatcgctcaagtccgtcatcgtcactttccccaagggaacgcctgactcggtggttaaccaggccaaagcctctttggtggcttcagtacgcagtgcttctttgttgtcatgaggctgttatgacactgtactgacacttttagggtggtgttatcacgcacgagtaccgtaagtactacatactaccttgcacatttagatatagagataccatttcatcggtactgacatacatctcttatcagatttgatcaagtatggttccaacggacgtttctgtcttataacctgccttctaactacgactttagtggattcgccgccgaggctcctgcgagcgctctccagaccctctccacgcaggatacccaatacaaaccgaatatcgaagaagataaggttgtcagtgcgtatggagactacgcagctgcagtctaatatgccatctccaatgagataccggttctgaatctcaaagcgcctgagcatacatatcatgacgtccaaaggcaaaaccacgtcggaatgaaccaatcagaattacaccatcagaatgatttaagtgatctaacgcaacctcgaggcttggattgtatacaatgtggagtcaatggttgagtccttatgcttcagctaagggctttagggggggggggcggacatatgaatctgataagtttacatttacactcaaaaacataactacaatgtattcattattataattcaagacctaagttatgtacttcgtacagtgtacttagtagcaaatcaaagagcgtagacaacgtagggccgatcatcctcccctccccccccccgctagttaactcccgtccctctggcccccaaggcgcgtggatctggaaagtccctcgagagccgaggccttcgcgttgcaacccttcacttcgagagtcttggaaatgctggaattgctggaattgcaggcctctttgacactcgattaaacgcgccgccaaaatgggatcggaacacacggtgaccaaggttctgttggaatggatcaacagcttcgccttgggtaaaaccctccgaaccactgacgaattaaccgatgggattatcttgtgggagattctccaggatattgaccctcagtatttcctcgaggaaatcccagagcgcaactcctccgaccattgggtggccaagtggcagaacctgaagcacatccacaaactattgctcaactacattcgacaccaaaacgatgacatcctaccttccggtctcgatccgtcgcccgatctcgaatcaattgccgaaaaagcctctcccaaggaaacgaacaagctgctgaagcttctcctgatcgcggccatcagctctcccaacgccggaacatacgtacaaacacttcaggaactaagcacctcgacacaagaggggctcagagatattattgaggaggcacacaatggccaatatgagccaatggacgctgcggatgagctcagggaagacctagccaagcacgatcgccctgtggatctggaactgcagttcgaggaacgcgtcggaaaggtactcgcggagaatgaccgtctaacacacgagaagaaagaattggaaaaggccttgggggacttgcacaatcgcctggcgcgtctccaggaaaacaatgacaccctacaaaaccgtctcgcctccaccgaggaccggctggttaccttgaaatccggaaagggtgatatcggtcacaacgcaaaggcattggaaagcaagacccgtcaacaggatgatctaattgcctctcaagaagcaaagttgactgcggcccaggacgaaatcgacagtcttcgcatggcagtcgagtccttgcgcgtcaagaaccagcgctatcagaagttgcaggatgactatgacgagctccgtaccgaaaaggatcaactggctcgcaaggcaaacgcagccgagaaataccgccaaaagctgcaagccagtcaggactttgagaaagagaaccagacactcaagaaccaaatcaaagatatccagcaacagctaaaagagtcggacgcacagcagcgttggtcttcggagcgcgatgtggaactggaagaatatcgcaagcttctgccacaagttgagcaggaatgcaatgagatccagaacttgaagaaacaactcgagttcaataatcatgcgctgacagaacgattggagagtgcggatgaacagcacgagagggacgatgctttgatcagtgaactacgtgaacgcctcggagaaatagacggcttgccgggcagcgcgtcgcctggctctgagacgccaaagatgcaagggacattgcacaaggactttgaggcgcttggtgtcaaagaatcacaactgtatgtatacattttgccttcgtggtcttattggatgctaactattgacagtaaatctgaggatgatttgaagcgggaaaccgagtccgttaaagcaccttcagctgtatgtgtgccatctgttttctgtgaacgtttgttgatactaataaccagcagccagcctctcatactggaggcttctctgaaaactttactgcatccgtgcaactggcgcgctctggttccacccaaaggtatgaattcccgacatttcgttcgtttcagtgaacagaatatttaacatgccttagtgacgactactggaaattatacgagaactataccggagctctcaaaaagattgcagaggtccaggacaccttggaaacagctaaaagagacctgtctgatacacaagctgaacgtaagtcttttattgctctggctctacacatccgagagaaacatgtgtctaacaatcttgaagttggccttgtcaatgcggaacaggtcgagatgctccaaggactcgaggcgtataactcggctgaattagcaaaagtccgggatgactgggaagcccttacacaaaacgtccaccacctggaggccgaggtcgatgcaagccagacgctggtgcgtgaagtctgtgcggaacgagaggaactccgcaagatgctcgacaacaagcaaagcgagatcagctccgaagatcaggaagttatgaacgagatgcagatgcttctaggcgagtttgaaacccacaataatgagggcggcgaagtgccccagaaatcgagcttcgagctcttgaaacagtgtgcgggagttctggagaagaatgttgaacggcttgctcagcgtgccgaggtcagtttccacgagagatcctcgctacgtcttatttgggttgtgtttgctaattctagcatgattctacagtacatccagcaacaaaatgagctggtcaaatcactccgtgagcgtatgaagaactatgaagaaaacctagacgatggcatttccaaagagcgagaggtaagtcaaagatggagctgttaggttctagcggtatgctaatgacactttttagcttgagcttcagaacattatcgatagccagacccgagaactcaaccttgtgggctcggcttggtatcaccttcagagccgatggcagaacaacaatatgacggtatcgcgatatcgacatggagccagcacgggagattctaagggctggctagcaaagcaaagaagcgctgttgctgggtagtggaatgccctatgaatcaaattcgtgccatttttttttttaacatatgcgttatatttttttcgtttactggtttggatgttgagattcccactatacatcccatcttattcttgtgattatttctacagcaatagaatctatgtcatttaaagaaccccagagtcttgattgagccagatgaatccattttgaagtagagtgagttcgtcgcattcggaaaatgtaagctacctaagtagatccccgcaataaaagatgtctatggaaaatacaaaaagcctaggtaattggcctagtcccaagaaaggagaaatagaaggggtaatgcagaaattataagaaaatggtctctatacaacctggccaaaagcgggaatcaaagtctgtgccagccagaagctgaagaccagcttgggacctgtcataagcagcttgggggtcagacccttgaagaagctggtggggccctcattcttgagcatcgtggagacaatcttgaagccagactcggggttctcgaagttgcggttctggatacgcgtcttgatgacatcgaggggagcggacacgactagggaggcactagcaccgcagactgaggcgacgaagttctggccccaggtggcagtgttgtaatcggtcagtttgtaaatcttttccttggcgaaagcagatccaccgaagagctgtaacagatgttagtgggggtccagtgatagtagatcgggggaaagcatacagcgaaggacccaggggcgttacgggcggcagtccagccagcaccgcggtacagacccataccctcatcggcaataatcttgaaaagaccacgtccacggaaggcatcggggttagtctggcgcttaatcttaagaacgtccagaggaagcagaacgatctctccaatgccgatcaaactaaaagatttcgagtcagatagatccttacgcccaatttcaatttttcttaccttccagcagtggcatgcataatggcctttccggtacccttgccaaatgccttatcgaagtcggcacggtggtgcttgtcgaggtaatcgcgtgcgaaaggctgaccaccgtacttgtagatgcgctggaggacctatcgatttaaagaatagtatgagctgtctgttctcccaatcttctgctgtcgataaaatccacgaaccttgtaaccggcagcgtatcccagaccggggaacaaagaggtgaacttgcgaccaattgaggcattgacgtgctccctaaagacaacctccttgaaagcggtagcgctggagatctgtcaaggatccagtcagcaatagatacatcttcattcgtacacaatccgaatctcacccgggtctggttgctcatcaatcgcttggcggtagtgtcaacctatggacgtcagtgtctggtcgcaactggtctcgaatgggagaatatcgtacgggatggaagatcagcaactcagcaataccggcagagcctagaagagtcagatttgagtaatgagctcgtattttgaacatctgacgacttaccggaaccaaggagacgagcagtggcagactccttcttgacatccttggggacagcgccagcactggtggcaatagcggaagacattttttttccaagtttgtcaagtaatcccaaaaaagagcaagagaatgagaacgccgatggattcaggaacatgtgctcggagttaaattttatcgaggcagacttggcactagtcccgtttgggagccgccatcggagagccaaggagttgcgaaaagtcgtataaatatgtatgtatatatggaatcatatgtatagaataaaacgatgctacttaagaggtatcaggaagcaagttgcactgtctaatctatttattccgagtatatgactccatctttgtacatctttatatggaaataggtggaatcacaaccgcatcggagtcatttgaaagtgcctgaaacagattcctttgatacagcatgaccgtactccgtaaatagcacaagtgacaaactgcatcggcacttgcacagcgctaatatctgctgtgggggtgaggaactacttagggttagcgtttggaacattccatggtaactgccgaggatattcctagtataatcagatctaaatactcctcgctacctgttttgttgtttactcgttacttggctcgtggataaagaactcatattgctcctaagtgtaaatcacttcatctagcctgatcagtggttcgtttccaggtcggtgctccatcattgctcgacggtacaaccaaaacataaagaaatttgccaaaaggatccaagaatattaccacaaccagaaagctcataatgattgtagttgcagctaaagagcatagttgccaagcaatgtgaaagaaaatgcgcagaacaccgaatgaaacgccagtgacccaaaaccagtatcccaaggtcgcaaaagccttctcgcctgcccgttcatccattattgactcactcgtgcaggttagagtgaccgagcagcaaagcaaatgagagagactgaacaacctctacaggtcaccgaaagtgttctcgccagagtatctaaccgttatgtcagtatgatttcatttataaaataaaataaaaaaggagaacatacgtgatgtataagaagccatcttcgtccttgtgctcttcgtagatgctgctcatgagcgcggcagttggagggaggacctcatcaacgaagatgaagatagccttctcaggggagagctttatgcgcttgcggatcacatagacaaactgtcccacggtaaggtcggccggtactaagtacttcttcttgtcgatggtggcgatatctgacttctcgaccttctcgcagatgacctgtagattaggggagtccgttagctaccgaacaagcggtgagggtctgagagtttggcagcaacaaccacctccgttggggagatccctgggattaaagatactcacgggaatcctgtcggcgtatttctggcgaatgcgttcggcctcagcctttcgcttctcgaaggggtgctcgtccttgaacttggatcgcatcgtgactgataagggtcgataagtgagagcgggtcgcgtggagggtaagtaggatcaaaaaaaactaggaagctctggtgcgaggttggtagaaatagtggttttcttgatgggaaggtttggatgtgaagtagcttgcaaaaagagagatgaagaggggtgatagaggatgacaaggcgactcccccgctgacgttacggtaataccatcacgggatccatgggcggtgagtcaatagtcacgcggcagaaatcagatgcctcgggctctgctcacgtgaatagcaaggcatatattatttacatactgcatcagtagattaaaagagttacctcccaatatactagtcaggtcttgaatatctagacgaaaagcgatctcaatatcggggcttacacgtccacgggttattgccccggtgctgatcccggggccgcttatcgtgcttatctcatccagccaaacagaccaaactcagctctaggagagtcgtacgatttgagatgttgcgtggtattttgctaaactgttgactcaatccaacttcttcctcatatcattctttatacggatccgggataccgctctctcggtttcggccattgaccttttgatactttgtgctggcagccatacgcgcaaccaattctattccaaaatggccacccgatcatacacgcctctgcggaggtcactagggcagttgtctgctcgaagtactcgcattgctggccgccgtgctggaccctcatttcgcgggtattctacagagcagaaaccgcgtgagcccaagccattcactgtctggaggccatacttgcgcctcgccattggcgtgcctttcatcggcgggatcatatactcaatggtatgacacggcgcttcaaaatgcgaagaaatcaatttgctcattcattccagatgacagaagaagtcacggaactcgacgctccatccatggttgaggtggacgaggccctaaagcaatcgaaaatcaacgactcctcgccgatgcggttacggatggaaaagctcatcaagcaacaccagcagaagatcatcgaggaactaggcagagtcgatgggcaacaattcaagactgatacctggtcgcgccccaatggcggcggcggcatttcgtgtgtgctgcaggacggaaacgtcttcgagaaggcgggtgtcaacgtctccgtggtgtacggcaaattacctcggccggccattgagaagatgcgtgccgaccacaagtcctttgttggctcagatgtggagtcgctagatttcttcgctgccggtctctcgctggtcttgcacccacacaatcccatggctccgacggtgcatctcaactaccgctacttcgaaacgtcagatcccaaggaccctatcaacggggacaagaattggtggttcggaggtggcacggatctgactccgacctacctcttcccggaggatgctcagcacttccacaagaccattaaggatacatgcgatcgccacgatgctacatactacccccagttcaaggcctggtgtgacaagtacttctatatcccccaccgtggcgagtgccgtggcgttggaggtatcttcttcgatgacctcgacgccaacttccttcaaacatccgccggttcctcctccaacccgcaggagacactgttctcgttcgtttcggacagtctggcgtctttccttccttcctatgtgcccatcattgagcgacgcaaggacatgctgtataccccggaacagaaggagtggcagcagcttcgtcggggccgctatgtggagttcaaccttgtctatgatcgcggaactagctttggcttgcgcacacccaatgcccgtattgaaagtatcttgatgagtctccctcgtaccgctagctgggcgtacatggatcctgtctccggcacaaggacagagaacatgcctgtggatgaagatgacctgacggaggataaggccagcgagaaggagattatggatgtgctgcgccacccccgacagtgggcatgattgattcatatgtcatgcttggtatatggtgtcgtgcggtgttttcttgatttctatatgtatactacctaaaaaaactttgtagagtaaatgtggataattattgagctaggtgtctctacagccattcccacggcaagtcttaaagggcactcgagatttaatattcgggcacgaagcccagactgataaaaaaaagttttcattttcgatcgacttcggattgttagacagttgaagcaactggctctggtactatccacatctgtcttattttccgttcatataggcatatatttgtcgaccttacatcgattggtaagatggccgagttggtctaaggcgccaggttaaggtataccttgactccataactagcaatagtttcctggtctcgcaagaggcgtgggttcgaatcccactcttatcattcctttttgtttttcgctcatctaggttgcactcttttcctacttgcatttttctttttggttggacagtgggttatactatgattaaattcatcgagagttggttgtgcccgaggaactttaggccggagcttttgccgccacgcatatgaccatttttagtgatgaggttgttacaacccttgtcggatggttaattatatataatacatagtctatccagagcaatgctttattcctggttatccagtcgatctggtcatacattgctcggcgcaaataagtaatggagttgtgattgctgtctagaagaaatatagggattgtatggggatatttagatctatactcctgaggttaccccggtttacccaacatatcgggtattaggactggtctttccaatgaatatattttggttgtcaggacacatagatgatagtatatggctatcttcaactggcttttatcttaggaaaccaactgttgttctccccaaccacgcccggtaaaaagatatctccatttctgcgcgtctagtatacgctgataggtggcctgcttttgacctagaagattttgacctagaagattgccagtagagatacaaacatgtaattctcctgtatgtgccggggtgatgaatggcccgatacgaagcgaatcagtagaatagtacgcagtctagagcccaacgcatataaaaaggcatattaaaactgcaatcaacacctccccgtgagatctaccaccgtactatagcttggtggtgagcgtgatagtcctctaaaccccactatatcgactgttactactatcatggtctaaaaagatactggtttactaggaaagaacatattgaatagcataggatgtaacaccagaaatggctgtcgtggcggaatacaaatattgatttgttagtaaccattgaggtcttgggatatcggaaaatagcataatagtagcgatgactagagtccctctgtgatttcatcgttaaaccaccttcatagaaacggacaggcaagcggaaagggtgagagtcccaggcatatttgctcactggaggtattacatatgtttagtgaaatccaacgggatcctggaatccatggcatcgtcccagtgttgtcttcatggctgatctcatttagatgggttttaagatcggatcatggccccgtggtatggctgatatcttctcactagcactacaaccgaggacgacgcagccaagaaagtatgatttattcgttttcgctaaagtatctaggtcattcatgggattttggccgtttcctaggggaaaataacctagtcaatagtataaaagacttctgtactccgtatagatttcacccatggccaaattggcgaacaagcaacaactttggagcatgacctcaaaatccaccacccaccaaaaacaactcaattgatctaagaaaagctttatattaaggtggaatgagcaaaaaacaaaaggcaattcgatgacaaccccgatcaacatggtagatatgcttctctagaatcctcgcctgcaactgagccattctctctgtcgacgtcgtaccacgcagctatagtgtagtttgagaaataccgttaagatctttccatggccgagaaccgtgctttgtccctggtggcatggttacttgctctggtttccatgatgaagaccgatcgaagttcgatgtcctgtagggtatttacagttgtcacattctctggccgatgttcaatattgtgatgcgcgcgcttatgtgctgtccatagcccaatgatatggtgggttttgagggcgtgttgctagcatatatattctctctcacattggtagggactgtggggaaactcaaaatccacaaatgaattcccctacatgtatgatttggagtataataaattgaaatgaatatttattgatactaagatattcgacctgtaatgtaaaggaaaaaaataagtaaaaaaaagtaaaaaagaagtgataagagtgggattcgaacccacgcctcttgcgagaccaggaaactattgctagttatggagtcaaggtataccttaacctggcgccttagaccaactcggccatcttaccaactgatgtaaggtcgacaaatatatgcctatatgaatggaagacaatgcatacgggacgaaaccctttttaataacatggaagtatatttattgatttgagaatagtagtcgaatagcactacaaggctacaaaacatacaaggacactctgaaaaggcagacgttttactaaaaagaccacttttacgaatatcttcgtagtcaaactagcaaatccggcaaaaatgctggattattagcccaatttagcaaagacagcataagtatcacactacatatttatactatttttttgaagcatatgagatttcagctgatacctagaattatcccaggataatatcacctcgaataatccatattgtaaagaacatacaacacatggagtagccgacggacagacggggttctagccatattctgattcccataagccgaggtcaaagcccgtcgccattggaccgttacacagaacagcgtagatactatatgccgtacatgcgatgtaagagtggcattgataaaacctttagcgtaaactctgcaatgattaaaggacaggttatgataggcatgattggctcctttttgttgtttgccgtcattggtattgacggtcgtccggctgaagggttggaatggccgattcacgcaccgaacatcggatgatgttctgtctgggggttgatgtcaccaaacggattcatcggctgtcggaattcaaggctcggagaattgaattcatgtttggaataaggtgttattatggcattggttattgttcctgtcggaattgtagttccggtctccaattgagattcgaagccttgactcgacgaatgagataaaagatgagagcgatatcgatacatttatgctgtactccgtacagatcccgcgcacgttgagaaaaactgttgtattcaatgggtatcgggcctgtccataggtctaaactaattatgaagttatatgagcaaatgcatctagactacaaacaaaactttccattccgaaaaccactgcatggcagaagggtatctcaaaccttctctagtgcttcgcagtgacactgtcgccggtcagtttttcgactgcttctttggccctgttcggtggaaaggagatctggttagcccgaggtttcacatgaaaaaggaaaggtggatcgcaatgacgacagggtaaggggaaaagtgtggagaatgcgaggaaagtggcttacatgtcaccaagagcaaccatgcagaccgtctgccagatgcccagaccaatacggggagccacaccacggtagaggccgcggatgccattgttgtcgtagatgtacttgaaagtcttgccgacggtcaagttcttggggcggttagggtcaggggtcttgctctgcatctcgacacggataacctcaatcggctggttccaggcggacagaccaccaccgagagccgaagccaggatcttttcccaggcggacagcttggcgccctcatccttgttggcaaccttgcggatagccgactcagcgagacgcgacagaccgaagcgggaaccccagttggtagtctggcgaatcgcaacggcgttgacaccacggttaataccacggatgccctccttgcggtagatatccatgaaggtcgcgaaggtgccgggaggcttaacaccgctggcagccatcttgtgcttggtgatctcgaccgtcttcatgcaggtacagaaacccatcgtagcgtaggcctgagcgacaccgccagccataccaccgctgataccggagacgaagtcattggcaccgaatgagcgggcgtagtattcggcttcggaggcgacgaagaggagcaccgcacccttggtggatgcctcaatccaggcccacggaatgagtccctggtagtcttaaacatccgatctcgcaattagtttgagttcgtcacatcttgcgggtccgccccccacgcgctagctagacgtgggaaattggaagcgggtattgaatggacacttacaaccgaaaatgccgccacggccccaaatccgacccatagcgcccgcgaagctatcgccccggtttgcggccatggttgtcttggtcacctccagcggcttggggatggttagttgcaatatttattaactgaccactgagggatgccatacctgtcccaatgttgtaacctcaaacaagttcaatcctgcgcccagcaacaagttactgaacttgacaggcttcttctcgagcgtaggggccgaggccgcggacgtagttgtagacattctgggatgatggatgcgctgaaaggggccctgaccaagggatataacggggcttcgtgcgtttgaagaagggggagaactaaaaaagttgaagaagatggattgcaaatgcgtaggaagttgggtggaagggagagaaggagaggagaaggcagaatagcttataaggtcgggggaatcaaagctttgggtcagtaagctggggggggggacagctagtacctggtacatccgatcgtcaccgtttccacttatatcattgggtacccagtacctcccatcagcctcggaaggaatccacctgcgtacttcggagcagttcgcagagcacaattattatttctattttgtatatccgatcgcatgtttgtttacttttacaatatccatgttatatactatgtattctatccatttcacttctatatctttggtggcatgtggagaacgttgagcggtgtcccaacaatatccccacgtgatcgattcaacacaggtagtcctcagaccgaggcgatattctacgctgtacgttgagtcctggaatgatgtactatacaattacggaatagtgttatctttctacatatggaaggtgtagatcataaatgatttgacatggaagttctgttacaaggcccgctcgaaccgatcaagtccctatcatacaacatgaaaattaccaaagactttctcggccaaacaaaggagataatacaaatgtctaacccgggttttcaacgggccccatgggtgatattaaaaaggagatgggaaattcatgcgcttaaagcttggcaccgaccaacttggcgtaggcctcagtgctgaaagacttggggcgctcaatgggcatgccaagagcacggtcgatgatcagctggggcaggacaccaatggcacgggacacaccgaacaggacggtgtagtagctagcctcggtcaaaccgtagtactggaggaggactccagagtgggcatcgacgttggggtaggggttcttggtcttgccgtgctcggtcagaacgccgggagcgatcttgtagacctggctgaccagcttgaacagagggtcatcgggcaggtggcggagagcgaactcgcgctgggagacgtaacgggggtcagtcttgcgcagaacggcgtgaccgtaaccgggaacgacctggccgctgttaagggtggcccagaggtagtccttgatggactggtcgctaaggtcgttgccaatggaggccttcatcttggtgagccagttcaggacctcctggttagccagaccgtgaaggggaccggcaagaccctggagaccagcggacagagagagcatgggggagctcagagcactgccaaccaagtgggtggtgtgggcgctgacgttaccaccctcgtggtcggagtggatggtcaagtacagacgcatcagctcaacgaactccttgttgccgccgaagccaagctggttggccaagttgaaggcgtaatccttatccttctggacagcggcgaccttgccatctttgaagacgttgcggtagatgcgggaagcaatggtgggcagcttggcgatgaggtccatggagtcctcgaaggtgtaggtccagtactccttcttgttgacacccttggcgtaggccttggcgaaggcagactcgtgctcgagagcggtcacggccagagagaactgggccatggggtggagggtgttggggcaacgatcgatgagctcctcaacgaacttgggaacgtcggagcgggcagcccactcggcagaaaggttgtgaacctgctgctcggaggggacctcgccggtcaacagaagccagaagagaccctcgggcaagggctcctcaccaccgggagccttgggcaggagcttttggcactcgggaatctagaaataacagtgagcaagtaataaaacgaaatccgagtcaatggaaacgcacagtgtggccgcggaaacggataccctcctcggcgtcgagaacggaaccctgaggaaaaaaaatgttagcgttgtcgtttgccaggggctatcgaaatttgcgatcttacctcccaaacgagggacttgatgccacgggcaccaccgtaggcctggtcgagggtaacctcaccaataactgtgctgccgtagtccctggaacaattgaatgccatggtcagctactgtttcaatttcaaatacagagcgcgtcacatacttgcggagcttcttgaccttctcgatctgggcgggcaggttatcggcgaaggtgtccttgagggactgggcgattcaactaagttagcattccattgaagctcgctggaaggacaagcaccataccttggccttagcagagtagcagcgcgcgccgttcaaggcagcggactgcaccggcttcgcgatggaagaccggagagtggtagtaccgattctgagggaagaagccatgtctaatatcaggcaggatatgtggtgtgtgtggtatagaggagatggggaagtggtcacaaagcctgggggagaagaagaaagaaaggaaagaaattggggacgagctgttttgcgcctaagattttctcggttcttttcccatctggccgtattacagccggtaccgttggtacggtaactgggcttacttcgggacgccgtggaagctcagtcagctatagctctctctgcagggtgacatgggcttgtaattttccctacacggtacggaagagcacgggctcgggctgccggcagatcaactgtgatgctacgtaggagattgcgaaataccgagagatattaattcaggacatgtgttctttttgctatatagtaaggatatttaggtcgatgagattatgtatttatataagatttatataactactaaacagatgcacgacatattcgatttattcaccagccctgggctggcatcaacatacgtaatcaattccatgcccggggccatggatggcccgggggcattccccagttccaatgtttccaaatttcgcgggcagtactccgtactgtaaatacagttcatatcgtatctctgagaggcaggtaatgacgtcgtaaagtcgccatttgttccgtgccgccatccgtccgatatggaagtcctcgcttatcagatggatataaggacatggatgtccacggatatgtaaatatatctgtacatatgtcatagtgcatgtgatggcgccacggccttgaatagccaatcgccgatcggaagccccagggcgattcggatcccaagtcctatgttgtagggctattcattgtacaagatatacagtacaattgttgtacaacggccttttctaaaatggttcaccgaggctgggagctatatagggcggtagccaggggcagaaccggattggtaaggaccctcggctccgaggtataactagttaagacgttatgcttcatgattattggaatcatgcctgtcaaggtccttgatttctatctattactgtttagtagactctaattattttcccggtcattcctttccacggtgtaacttattatggtacataaaaatgatagtaaaacaaggacacattcatcaatatctgaaacctcaatgtttactgacatgagccctgcgctatttaaaacatagaggttggcaacaatcacctcgacctctctttttagcccctttttgctttactccgtagtgaggcctccaacttcagatatcagatataagattaaaagaccccggttacgggcagcagccaaagacgcaatttcacaattcacgtgacatatccacgataggactagcgctagtcgcagagtcttcccctttgatgacctccattgagcttcatcttcatcccccccatctcagcatccttcttcctctcgatttcatcggtttctcaacctcagttcatccgctaactgcgctggacttcactggatcctcttggactccgtaaaccctgatctggtttctctctgggatctcactgcaaagacgctctaggctgtacatctcccgtactccccgtactctcgtactcggcgctaggtaccctccctggacacaatatcgctaggctgtattccagctgtaggcggctattctctggtcgacagtgaatgcgcccgtggagtctgtagtgaagaatcgccagggactcgattaaacatatcttctttttttttttcataccgaattgacagtcgcgtcacgaaacgcagtagcccggccccctcgattacttcctatctgcataaagacttgactggggacgtgtttcattcattctttcgctactccccttccaaacggtagtatttcccgccatgtcttctgcagtagctgaactggagaaccttctccaatccatgctggccctcaagccgcctggcgtatctggctcaaagattggtggcatcacaaacttgtgcaatgccaacgtgcaggtacgcttgtcccctttggtcgattgattcatctcattggtcctgtgtgatccatgatatgctaaccctacccacagaatgaatcagttctcatccagaagatttacactcacttcaagaaggcccccggctctcacaagctgggtgtgctttatgtggtagactcagtaactcgccaatgggtagaggctgcgcgcaaggccggccaggttcctggcggtgatgcgccggatggaacttacgccgctggtgtcaagcgtgtcactgatctcttgcccatcttgatgacagatatcatcaataacgccccccatgaccaaaaggtatgtaatgagacatccctgtatcatcaaccccatatcccaggatcgcagccctggtgagatagtcaagcttcgcatattgtatccttgcctcgatgtacttcgatctgaagatcctgctgccctgaccaaaccgttttggacaagtaactgacacacatctcgtcaatttaggacaagatcaaaaagctagtcgacatctgggaacgtggtgcgacttttccggccccgatgctcgcttcgttcaaagagaagctgaacgctgctcaaagtaagtccccaatgatgtcaagatatgccaccaatactcacaatgcactagatgtcgaatcgaacacccccgaaggatcccctgcaccgaacgccaacccgatcggaatcccgcaacaatcggcgacacctgatacctcgagcatcctgaaagctttggccgatatggccaagcagaacactaccgcgcctgctgcaccttccgcacttgcgccggccaaccctctgggtgctttcaactcggcctctgtgacccctgccaatgatccaagttcgcatatggctgctgccatgaatgcactcggcgccggtggacctgtcgcgactccctttgcgggtatggccggcatggctcagaacccggctctccagccgcagagtcaaagtggaactccgatctcgatgcccgccgcgaacccgctgacctcaatgcttcctcaggctgcgcaacccgccgcacctgactcaaacgccatggcacagcagctacaacttctccagatgctcgctgctcagggaatcccccaggaccagtggggcactgccttgcagctcttcagcatgaccaacaacaatgccatgggcggtatgccgggtatgcctgggatgcctggaatgcctgcgatgcctgcgatgcccggaggaccgatggctggattcaacccgatgcaaggacagaacattggtggatggggtcactcggactcccagaacaaggacgatcgtggccgtgaataccctcgctcgccgcccactggatatcgtcgtcgttctcgttctccgggctgggatagacgccgtactgcttcgccccctcgccgtcgtgacagccctgtctatggagaatatgaatcgcctggtcgtcgtggagacccgcgtgatgctcgtggccgtcgtggtaatgagtatcgccagcgtagcccccctggtggccgtggcggtagacgtcgctcgccttcgcctgctcgtaacaaggatcccaacctccctccccctggacccaagttcattgaatgggactattcgatcggccagggtatgattaaagtcttgagccgaactcttttcgttggtggtgttacctcctccgaggcccacctgcgtcaactctttggtcagtttggaattgttcagacttgcattgtcaatgtcgacaagcgccacgcttttatcaagatggttagccggaccgatgccatgcaggcacgtgatggaatggaatcttaccgtactggcgagatgcaactcagggtaagtccttctcttgtttttattatccatggatcttatcactgaccttatcaatatagactcgttggggtgttggctttggcccccgtgactgcagcgattaccagactggagtcagcattattccgattgagcgattgaccgaggctgaccgcaagtggatgctttcggcagagtatggtggaactggtggacgtcccattgaatctggaatgattgttgaagagcccgatattgaaatcggcgcaggtgtctcctccaaggctatcagccgccgcattgccactgacactggcggcaagcggggcccaatttccactcgcactaatcccaatccccaggacactcgtttcggcggtcgccgtcctgagcgtgatggatacggtggcggtcctcagatgggtggtgaacttgacatgcctaatatgaacaatcagggagccgcacctgcagttccttcctatggtttcaacttcgctagcatgcccatgttgccccccggattcatgatgggtggtggtcagcccggtatgcccggtgcgcagcctccttccggtggccagggcaactgatttttcttgatacctcattgatgcgtgcacatatggtccaaataggttgcgcgcaccgcgcatggcaaagacgttgggggattggactttttttctttctttctatctcgaggcatatcatttcggcgggggtaggttttcgttttttctgcacttctcttacctttaatttccacaattgttcatgaggtcaccgatgattgttaaatcagatggatacattagggtcaaacaaacttatgacaaaattcaaataactcatttacatgatcccatggttccctcgtagggtttttcggcgcaatctttttagggtaaatttacagacatgtcttacttgtagtatgcatcttttaaagtgttcattgatatcgtatcgaggtcatcactaagttcaccaagctgctatttagtgtcctttcgcattccatcttcatgctcgaaagcattttcatctgtcagaaccatcaagcagtacggtccggcagagcctttaatgcctggaacgattgctcaaagtcggcaatgatatcgtcaatgtactctgtgccaaccgaaatgcggattccatcctccttgacaccggagtcacgacgctcctgctccgtgagctgctcatgggtggtggaccaggggtggatggccagggtcttagaatcgccgacactgcgatgtgttagtaaaagcattcaaaggagagcgaataagaatgaaccatacttggcaaggttcgagatcaacttgaagttgtcaacgacctgagcaccagcggcagcgccacccttgatgcccacagacagcacaccaccaaagccgcggggcaggtacttctttgcgagctcgtgactagggtggtcctccagaccgaggtatgacacccagctgacattctcgttctcccgcaaccatttagccagggcgagtgcgttggttgcgtgtcgctcgcatcgcagactcagagtctctatgccgagtatcaactgctgggcaccgaaggggttcagggtggagccgaggtcgcgcaggatctcaacgcgcactcggatagcatacgcaagcgagccgaatgtctcccagaacttcaacccgtggtaaccctcggatggctcgacgaattgggggaaccgggtagcgttcttgccccaatcaaactttccactgtcaatcacaactccagcaatggtggtaccatggccaccaatccacttagtagcactgtgcacgacaatatcggcaccgtggtcaattgggcgaacaaagtagccacctgcaccgaaggtgttatcgacctaaagtaaaaatcataagctttgtatcctcgcacgcttctcaaacaagcaacataccacaagcgggacacccttctcgtgtgcgaccttcgcaatggcctcaaagtccggaacattgtagcgggggttaccaatagactcaacgtagacagccttggtgcggtcatcaatggccgcagcaatatcctcaggattgtcaccctgaacaaacttggtattaattcccaggcgcgggagcataaccttgaactggttgtacgtgccgccatacaagttactcgtggagacgatattgtctcctgcttgggcgagggccgagatggccatgaattgggctgcctggccggaggaggcagcaacggcggcaacaccaccttctagagctgcaagtcgcttctcaaagacatcgactgttgggttcatgattcggctatagatattgccgaactctttgaggccgaacagcctcgcgccgtgggccgagtcattgaacacgtaagagctagtcgcatagattggaacagcgcgtgagtttgtggctgaatcaggttcgtgacttgagctttaggttagatttgtctttgaagtgaaattggacacttacccagcatgaagctgcagggtgtcgaagtggagattctcggacatggttcaagatatcagaatgaagtcgaggcaagagaatgtccactagttcagatttttcacactctaaggattgaactgaagacagagaaactaaagaagatcaagtggaaaaataaaaaagggacgatcttaagatggcggggagcaaatggtggggtgcagatggcgtgattgggggtttatactccgggcatgttcctgcatttgatgatacatgtatgttaggtatgtgttagctagtcttgcttcctttgagcctctttaggcaagagagactacattgaaatcgaatatcttaggcttttctgtctacgaggtatatacaacagtgaggattcgctggtgtagcccgggtgaagcccattctgctgatcaagaaagaagagagaagccatctaaaacagccgatcacacgcgggaaaagactagataaagaccaattcttccagcttgcccttgtcgaggaactcattgatcctccttctgtcaggcgaaatcattatctcagatgcctcttgactttgccagatctccggggtgtaatataagcttggcaaatcttcatagactagatggagattgctccggatgaatgtttcaaatctgaccttctccatggatgtctccttgtcggctatcttcctggaagcctcggcacgagctatagcagtcaagaaaatctggatccagaacatcttatgtgtgaccgaatcgacccgaggacctgtcattttctctgcttgctccaatgcagtttttcctggcaagccgttctctgatcccattataagcttcctatataaatatagtagcatgtgcgaatgggtggatatactgggagaatccgccattggggatccagccagtgcctgtacatcctggatggcccagattgcttggaaagaaaggcactcgatggttggcaacttagggctattctgtagcagagcagtctccatctgcttgaaaagagcggcttgcttttgggattgggatgagatggtgatgacatttggtaccggcttgaggtctggttggacaaatgccatacgtgcggaaatgctattccagaccttctccgagtaatagcgtttccaagtagacgagttcagttcgaaaagcgcgctgagagtagcggagctaatgcgtgatgcagggacgtcaactatcgacctttcactcgttgaactccctggagctgcctcaagtgactggatagcagcatgaactacttgaatccagaaataggcctgtgtttcggaataggggggaacggatgagttggtcgttctaaggcggattgtcgtcatctttagcgaatcaagtgcttccttgaccacttgaccgcgccgagcgcctgaagtgagagtgtattgaacaactgcaaaggcgtattggaggagccggtccgggttactgatttgtccgggaagagaatcatgatttagacttgatagtccaggcacgggtcgcaggtcaggaagtgaccatgactcccgtgccgtttcagaaaacatatgctccttgctgtagtatagtctccaaaggccggtgttcattaatgacggcgtgtagaggaggacttgctgaaagtcattccaggatgggaatttttctttccctgtgtggagtttgtatttcaaaatagcattctgcagttgtaggagccagaatattgtcattgttctttgatatttcagcacaagtcctttgaaaggatcatccgatttaggtctcttaccgatgctctgtatttcgaaaaagatcgggtttcatcgttctcagtctccttatatgcccaaggaaagtttccgccatatcgaacacattcttcccttccttgattgactccaaagtaataatgaagcctgacttgaggtgactgcgatggtcccaccctgtcaaatcagcactcaaaaacgaatgccaaaattgccgaggatccatattatcttcggagccttctttttcaattcgtactttgagattgtgatcatctgatgcctcctctttctgcgactgctttggaacagggtgcttagggatctgttgctgatggtgatcttgttctatgctagtgatgaaggcatgtagatcctccataacctgcttgaccccttccccagtcttgccactcacaggataatcaatgactttgcatttgacagaatcgtcgaatatttcctttaatcttttgccatataccaagcgtagatgatcaatatcttgtgcagacagagagtcttgagagtcttgcttgttaaagataatccataaacttctataacccaccttgagcatttctttgccaatgatagagaggagatcgaggctttcttgtgtgtattcctcatccatggtacagtcatggaagaacaagacggatgtgtctggggaacaaacgtatgctaaccaatttgggtaccgaaagcatcccactagatgcgtttagaacaaggataagttgtccagaaaggagaattgacgtacttccagtatcccagatcatatatgggtgacatttatactcaaaggattcgaggtagtggcctatggttggaaatgcatcgactgcttgaccaagaataagttgggaaagaaaggtagtcttcccagatgccgcctctccaagaataagaacttgccgttcagaatacccacggagccatttaataacgctttgcagtgccatgggagccacgtcaagagtataaaatgagaaagacagagtatcgactgctgatcagagcaacctcggctccagggcttgagctctggaggtggatgagtcagtgtactgaaatgcgctagtccggttatggcaactcttagggcatgtactacttttcacatgccaatgataacactatcctaagacaagccgtgtgcttctgtgacatagtcgatgttgaatgccgatatctgaatcagactcgatacagaagcaagttcgtcgtctgaatacacccgctcttttcaccattccagatttcagatatgtttcctagcgcaaagtgaactgagctctaacccgaacataaatgccataccaacatcgaaacaaaaatcttccgcatttcccacggtctattttagtttattaagctttactccatccatctccatttgactccattttgctccatttgactccatacatcctcaaatggattcgaaaaaagtggacccgcgcgggattgaaccacgaatctccgaggaaccgcatgaaaactcccgggggatgtttacataagctcggcgccttaaccattgggccacaggtcctatgtcgcaaacccgtcgtggattgtctacattataagatgacttcctgtatccccaacctctcccaaccccaagcccgtacaatatacagagtatcagccttggttattcacttggtttgtatgtacaagtgccagggccaccatcgcccccaatcagactgatctagtccaatgaatgatgaatgcgataaatgcgacttatggacaccacttgcattattctggagagcaaagtaaagtgaaaatcggtttatcggagtgggtcacgtgtgtggcttcagccctaccgctctacatgcaaagactacaacatcaagggcaccttgctacttgctgtatgatcactttttcgggttcttggtgtatattgcagccttgtaatatacagagtgtgataaatggttctctcgatccatacactccgatatcaaagggccaagggtacatctgtcttcatctacaacgatctgtagaaatgtcgacttgatactcttcatcatgcctggttcaattaattattgtctctggtgtgagttcaaagctaggatatgtgttgcaaatgcagcgcagatgcaggaaaccaaatagatcagccatacctatagaaacaccccctttacttgagatgcagatctctgtccaggtgagaataggttacgttctggccatctacgggatgttttggtgtcatgcaaccatatgcagtcatttaaccgatctgacctatggcgttaaatttagtctataaggggaatagttcgctgtattcttttaccatgtcatattagccgtatcattctttcgatgaaccaatcatttcaatgaacttctgtttttctttattctcgcctctcgtccggggccccgcatcccagatttcatggggaatctccagaagtcacataatccccatatgtattggccaattgaaatagaatttgaactattcccagccttctctcccaagccagttactcgtaagcgccacaaccttcctagtcagccagttctcgacgccctcggcggtggctaaccttttctagtcgcagctaagcctctagcccgtctcggcgttggccactctcggataaattgctgtagcagtcgtactttcgggaaacgggtaataccccggcgggacaggttgcatccctatccatacgatcgttgacttgtttgacaaactctcagatggcagaattagtccacgtatcacgcgcatgccatgcagctctgcaaacgcgcacaagcggtaagatataaaagaccccagtttgtcctttttgcgtttcccgagcttttgattctcattccctttttgacctggaaataacgactatttccgaaaatgtcatccgacaaaagtgatgacttgtacgagaaggctgccgttgagcaatctgaggtcttggtcaacaaggacctcatgaaggatgccttcgatggagagaaccgcgaacatgagatgacaacgtgggcggccatgaagagccacccctgggcttgcttgtgggcattcaccatgtgcttcactattgtgagtttatgctacttttctatttcccccgcatttcaggttcatctcccccggatctcgagatcatatcagctgatccatataatatctaccatcaggtgatggaatcgttcgatatgttcctaaatggtaactttgtcgcgcttcccgcgttcaaagaacggtatggcgtcgacgttgagggacacggttacactatcccgaccaaatggcaaagctccctcttccaggccggtcaatgtggcgctttcgtcggtgttttcttggccggtcctatcaccaatcggtttggctaccgcttgactaccatcttcgccctgatccttatgaacgccaccatttttatttccttctttgtgagtaagccaaccccaacggttgaacttattctctaactgcacctaggccgactcactcactgtccttgtggtcggccaggctttagaaggtatcccttggggattctttattgcaaactcccccgcctatgccagtgagattgttcctctctccctgagaggtgcctgcacggctactcttcaaatgagttggtccatcggttcaatcattgtcgccgccgcaacctacggctacaataagcgcaacgatgagtgggcttggcgagtgcctcttgccttacaatggatctttcctgtgggtcctctcctttgaggtatgtttttacatactgactccttctagactcctctcttgatcctcctcttcttcgcccccgaatcgccttggtggctgattcgccgtggacgcaaagcagaggcccttcgttccatcgagcgtcttggtagtgaatctcatgagcaagctcagcagtcgcttgctatgatagaacgaaccgttgagatcgaagctcaaatgggcggtaccccaactcttctcgaccttctcaagggcaccgatctaagacgaactatcatcacctgtttaatctacgcgtcgcagaactttgccggtaacttgattgccaaccaggcaacttacttcttcgagcgtgagtagttcctcctctccttctaaattctcagccgcaatagatgactgactccctacttagaggccggcatgggctccgaccgttcattccaactcaatctgatcaactcgtgtcttcaattagttgccaacataatctctttacctctggcctcttcatttggtcgccgaaccatctatctctggggcacagtcaccaacatgatcctactcctgctcctcggcgtctgcgcctctatcagccagaatacagcgaccaactacgcccaggccgttctaggaatcatcatctccttcgtctttgccggtagtctcggacccatttcatacaccatcattgccgagagctcctccgtacgtcttcgcgccttgagcaccggtgtcggtcgtgccgcgtactatttcgccgagatccccatgatctatcttgcctcgcaaatgcttaaccctactgggtggaatctcgctggaaagtgtggctacgtctggggaggtaccgcttgtgtctgctttgtgtcggcctacttcttccttcctgaactcaagggccgctcttaccgtgaaagtgatatcttgttcaatcgcaagattcctgcccggaagttcaaatcgaccgttattgatgtcagggagaacgagtaaggcatgacgatatgaaggaatgagatatgcttttgtgcttctgaagcgtggtaaatcagaagaaaagcttttatttaaagaccattaagtcctctagtaaacgttgcaaccattccaccgagtagatgtgcgcaacagatacattcgcttcactctaccaatacagtggccattggtacagaggacactagcaaatctaccactaggaaggcttcatcgtaatataatatacgcagttgatgctaatagacgaaataggaagcataggtttaacactcaattcggttgtccagcgcccttatttgacatttttttaatagccatgagctagaaaattgaagtaatgctcttctacttatgagctatgtagattcttattcagtttggcgggtacctatgtaccaaggcggttaggtataaaagttcgtaacttttataggaccacatttatagttaggatggtgatattatatgtatgtcaattagaagattttattgcctataaggtggcaaatactttaaatgaacgatcacatctcggtacatttgggaacggagaaaatctagagaaatatagagcagggttacacgtggatgagctagttgcccatatgcttagctctagtcagtgaataagatacgaggtctgagcagtacagcggaaaggaaaatcgaatgaaatagcagaggatcaagtacctgtgtaggtagaaatagtaagaatagtacaaccaaaaatgccacccttgtagttaaaacaccgacgctatcaaatcacaaaaagaaaaaagaacatacatcacaacacaattgcgcgaaaactccacctgcagataggaaatctttcaccgtcccatagattgcgtcactataggataatagaagatctggtcatattggtaatacatcatcacggggaactcttcgtctcagaactcttcatttcagaattcttcgtttcagagttggcaacatcgtttggagccttttcagattgaacgattgaagctgacgttgagctctccttgtagggcttgtccgacagcttggcctcggcggcggccaacttggcattggttgcgtccaaagtcatcttcagggccttgatgtaatcaatggccatctccacggcggtagccttgctgatagcctggttggccttttctttctccttttccttctcgttggccttgcccccggattctgcggcatccttcgcgctgcgtgcatcgatgaattcctgcggaataagaagctcaatctccttaagcgcattgttgattcgattccggcgcccctgctctgcgagcttgtgattcgtgcgcttggagctcaggttctctgccagggcctctggatagcttacacccgatggcagagtgccgtcgagaatgtgttgatagttggactttgatgcaagataaagcgcatcttgtgacatgcctataatatagtcagtataacagggatgaaattcaattctggtcaaaactcaccctcgttgcctttcataagcggctgaatgctgggactaatcttgggccgcaactgtgggctggcctgagtggaactcaaactaggtcgtttccgattagacgcagccctggtatctgatttccgagggaccggaccactgggagacggcattgcagttgtgcgtggactgggagcaagagaggcactgagaggcttatcgtgcgccgaaggactcaagaaaggtgttccattcgtggggattgacggagtccgtacagcggtgtcgatgcggttgggtctcggacgcagctgcgaaggagcggccgcctctggaagtgatatatcttccattatatcatctgggaactcaggctctgcaagctgcgcttggccgcggaattggcctgcggggtcttgcgaatgctgattccgctgaatgcgcatcaaaagcgcaggggtggcggcagtaccgggagaagagctttgaacatggggagcaattgcaggagacatccgagggggaggaagagcgggagggggcatcatcggttctgacaatggctcaggggataccgagtcctggccggaaccttcattgctgctgagctggagtgagcggatgtcctgattttgcggctttgtcgagttcatctcctgggtaaggctattgtagaactcctccgaattggtagccaaggtgctgcgtttgcgctgcgcccgaataatgggtgattgcttgaccttccgtgtgttattgagccgattagcggttgatggccgctgacgagtgttgggtttccgaataatgctaggagaaggtggagccgagcttccagggagagggttcacttccgtagttgtgggaacgaagcccatgtccgaaacctgtcttgcgtggtactggtaactgttggattcggagttttgggccccgagggcgggagaggtgagaggtgtaaagtattcgccggggattgtgtattcggggagtcggaattggttctccaggggcgtcatagccggtgagataagaggagtgtaaagggccttgattgttagccagcaaattcattctcggatttgtgtcaagactaacctgttcctcgttcatgcgtgaatatccgtcgtacatatccgtttcgtccacgcgatgggggtatcgggcggtattgccatgcatctcgatactgttcggggtgggagggatcatgttgtggccctgcatataatgttggtgggtaggcggttgcgacataggcgatggttgctgcgcgcaaaagcctggcgtcataggcattgagttgccgtggttcgtgtgcgactgtgcgttatcgttgaaatccatgaggccctccatctggcccgagtattgcatgccatgcgatcgtaggtgagccatatccgagtctgggccggtggaagttggtagggaatgggaatgttgcatattccctgttcctggtccgtgctcgatttcggggaaaggtatgttgaaatcgaacaggttggaaaattcttcctcaccaggcgcactgatgagattattctcatgcagctgctctggccacgacatggctggttgttccattttttgtaaaaggagatatccagttgggccaattaggccgagagagaactgggtgttgaagtagccacctgcagcatacagagaagatccgagaaaggaagaacccgggcaatcgggggggggggaaattgaaaagaagagaagagatgaagtggagaatcaaaaaccttcggggcggagacggtcctccgtggtcggcaacggcaccttgccactgtgttggatgttagacgaagtacgagcatacgcctttttaatcttattcctgcgctagatgcgcgtgtgcttatagtgcatgctgaaagaacctggtaaaaaagtactagcttactatggagtgctcccataggtatgttctccgtacttcgtatagtccaaatctctttttgtcccgtttaacccacagtggggatacggaatacggacaagcttccggggatatatgcatgagatttatatttctaccaaagtaagaaggagtagtaagtagtactaggtaacagttatgtagtcaactatgactcgaacatatcaacttcgagggtttcccaggtgcaggtggaatataaatccacatgcatggatacctcaggcagagattgaggggtttatcacctcgtgatatcggcttacctgagcaacaggcatgacatgatcactttagacttccccctggagagcttcgtaacctatttaacttcgcttgttcggtaatctttcctgtgagatatgccctcatgatgagacctactccagacctcccattctctcgcaaaccctccgaccatcccccatccccatccctcgatccccgcactgcaacccctgcgaccttcttcttatcgcggaatccgcatgtcgcggattgggattccagtatatcgatagatagccccgaggatgtcaaagagaatatgtatggagtacaaagcctagatacctctctgtcccaatcagaattcccatcctggccccgcaatcactccgcagaggacagcctgaagcaggcaaccgacgatttagaatcgcacctcgcacaatgccggtcaacgttaaagccgttaaactcagacaccggggaatcatctgaacatgcatcacccgctcatacagtgtctcggcccgtgaccccacttacgttgggcatccccgatgacccatcgtcgctgcccagcagccctaaatcaatatccaaccagtctttgcggccactcgacgatatctctatcacagatgaaatcaatagtcaggctatcggatctggagatgaagacgaaatgccccatgagtctccttttttgggcccaggtggggcggcctcccagcttatcatgccaagcatcaaaatgcctagtcggcgaccgttcactgagcgagggaaagctatgggacgattcaaggtccttttagctggtgctcctggtaggtttcaacagttctagagaaattacacgggctaattgtctcgaaaattaggttctggtaagacttcattgattaagtctatcgttcagacatgcgacgatatcgttcatgtcgacgccatcccacagatgacctcttcgggacgccgtagatcttgccggcctcgatctcgggggagatcgactgctactatggaaatttatgctagcaccaaaccttatccttcatggtggtcggatctggaagattcgcgcgtccttcagcggcggaaaagcatgggggaaattgtgctagagaggaatctctgtttcgtggacacgcctgcgacaaatctaagccgagcaggtcaaagtgacgctatcggggagtatatgagacaacaattcttccgtgccaccactgcgctcagtgggtctagtgttgatttccaaaatctcctagccgggaatggtggatcccaggtggatgccatcttatatttgatttctactggtaggctttttctattctatctccgagggatacatcccaaattaattcctggtcgctaaccttctacgtgcagataccctctcaacagacgtggaatgcatccgcaagctctgcgagctaagcaatgtgatcccaatagtatccaaagcagacaccctcaccccgactcaagtcactcacttgaaagtccgcttccacgaacaagctcgcgaggccggaatcaaaccattcctattcggtgatctgccgaacggtcaagatgggctcgaatcccaacccccttatgccgtctcttccgagaaatcagtcgatgccgaaacaatggatgcaagcactctaatgagtccagactacgttcaaccactcataccctccgaactagacgccctagtcacaaaaatgtttgatcgcgacaatctagcctggatgcgccattctgccgcaaagaaacttctccagcaacgcaccgactcgtattcgctcccgtcctcaatgccgttacctagtgcgcagctgggtcctaccgcaaatgggtccgaatatgcatatagcagctggcgttccgtcactggaacctctatgtcgcccggctctccccccggctatgccatggcccgcatcgcagactacacccgacatgaggagcgtatggcgcaggtccgcctcgcacaatgggcgacagacctgcagcgcagcctgcagaacgagcgcaatcgatacacctcgatagcccgcggcgagcgcgctatatggctcaccgagcggctaggcgagtgtgttatcgacggctcgttggtgcctctttcacagacgcctggcttctgtggcttgcatggcccgatcgacgagaagagccctggtgggttccaggtcatgcgctcacatgccggttccggggcggcgtatcgcttcgcgaagttcagtccgcatgacccgctcggcgtggttggctggattgacgaactcggacatcggagctggatgcttgttcagattgtcgggagtgtaggggttgttggtggtctggcgctctggcttgcgcgcacttggggatttccaacgcgcagtctttcggatttccgtgtcgattattggtgtggtactatggaacggtaggtcgatgagataatgagggtatgagtatgtgatattggctttatagagttagggtctcctagtttgttgtctgaagcgttcctactggatgggtttttgtttctctgctctttgtcttcggaaatcattgctatcatcttccttcggcgtcttatggccggtgtcttacggctctgggactattctccttgcggttcagggtcacgtagcatattaagatagggattacttcgcatggaagtgataaatgtgatttttatttgatttttattctgtgtgattcatcttaatccttttaccccgtctatcattgagattggacagtgtctgaactatatcgacttcgttttcgccatttccattcatagatccaaagatgctgcgatcttccatagcttggtaagatggccgagttggtccaaggcgcacggttcaggttaacctgatcccgatggtatacaactgtctccgtgtctcgaaaggggcgtgggttcaaatcccactcttatcatatctttttgcttttttgttgctagcattatcttttgcttcatagaataataacaaggatactagtctaatagtctggcagcgccttgtcatgtcgttttggtagtcttttcagcagtctccgtaaatttatagtattttctcgcccttcttagatagacggcggaaaaagacgcttaatttgtgcagacgacctccgtatgtatgacatttgattacgaacttagtaaaaaggttgttgttgcttttttttcatttaccttgctactagtgaagtatgtcgtcagaataggatgtagccaatgaacctctatctatatcaatcaaatcgacaattggcctgccaacctccagaactcacattgttgcatcgatttttttgtaaataatgctaggaatgtgtgatgtctatgtgttgcagttagatagcataggcgtgagcaagattgatataatcttagcctcggtcattactcttctgcatgaggtatactacaaacctgcatagatcttcgtcttaattaattctatgggatgataagatcaaaatccgggatattgctcgggaaaatggaagagcagggtccaacgaaagagtatgaagaagcaatggtcaatccctgcatgagattatatctcaccccaagattatggctatcacgagccaaggaaatccataggtctactggagagaatggaaatagaggataaggtacaattgtattacagtcaactacacccttaaaagaacaaaagagatatgggcaatgaatctaggcacaagtggtcacatcaaatccaaaacgaagggaacatagttttccctctctacggtgtaatgtatacagggattttaaacggtcagaccgaggtcctcggcgaagggcagctggtgaatatcacccacgctgacgagggtggccttgccagtcaggaaggtgttggcgacctacgggtaactgttagcatcatgacatcaacaatgtggatagagaaagaacatacctccttgacctgctgctcggagaccttctcgagagcctgagcaatctcgttgatctggtagggcttgttgccgtggatgaggccggaaccggtagcctcaagaccggtctcgagggtctggacggactccagagcgcggaacttggcgagagcaatagccttcttgatgtcctcggaggcgacctcaccggcggcggccttcttgagggcatcgacaacgttcttgctggcggcgccgacctgatcggcctggccggacagggtgacagtgaaaagaccggcatcggagtaggcgttgttcttggtagagacgtggagctggttgaagcccttggtggcctgcgacagaagggagaagccgggggtccacttgatagtggactcaccgcccagaagagcagcgagaacggaagcctcggccttgtagcctgcggtgccgaaagcgctggaaccggggaaggcgatcacaacagcattgccgatcttggaggcaatgcgctgctcaccaccgtagtacttggaggcgacggagggcagaacgttgtacttgctggaggcgtggctggcaggggtgtccttgaagaattgaccaacccacttagagacctcagcggagttggggccgctggcgacaagagcaatgttggacttggcgtaggcgctctgggcgaactctgcgagagcatcgccggagacgtacttctcgtaaggagaggtctgggagggggtgatagaggcgcccagaccgcggtggaaagcaacaccgtgggcggcatcgacagcaacggtctccgggttggagtggacggcctgctgcttgtacttgatgagcttgctgacaacctcgtgcaattcgtggtctaattttatggaaggggcccgagtcagcaaaagatgctcatataattgcgatccaccacgtcaaaagggactaactcacctgcaaacttggtctgggtagcaacctcggccagcaactctgtgaagtagggcagatccttggagaggaacttggtccggaggacaatgttttcgcgcgagtgtgtcgacgagatttcaccgcctagcagctcggtctcccgggtgatccgcagtgcagaccgcttgagggtagtctattgaggaattgaatgattagtatcaccaaatatacctgagatgaatcaattgatgccataagaccgaccttgaaagcgaatcgatcgagagcatcggagaacccagggaagggctggtaacgggagccagccttagcaaccagagccagggtgccagtagggccctgaacttcacggttggcgacctttacgccggaggcttcggagacatcgtactggaaggccgggttgacagcggaggccatggaccgacggccggcggccaaagcacgcggcgcatttcggctgagggaagatcgcgacagcatcgtcgcctgtgccgagaatctgtgagagaagaagaagaaatataaacccgaattgggtttgtaaagaggcgcaaatgaggcgggggaggaggtgggatgcggagagagcaagagagaagaggcagtttgggaggtcacgaaaagcttcaagatcccgactcgtcactccaaccaatcagcggtcaagtaatcaaaagcgcggacggaaccggagttacttttattgcgagtagtagttatataggacttttctattgtctttgtattgattgttatagtctaattgagcgtttttaaattcaaaatctctattctaaagaaagtcctgagtatctctattgtttcccccattgtctctgaacaacgttgctgaatgaggcatttgaatcagctgattggccatatcacgtgaatataccgataagcaaaaataagaacaaaagaacaattgcatctcatcggcggtggatttttggacctgcagatgtctgctagcttgtaaatcttcatgagcattcggtgacccttaggtgccccctctcgaggtttggtggtgaatcttctcatatctttagcccaccatgatgatgtctcaggtatgcgactgtcccgctaacctcgagagagctacttactgacatgaacgtagtgctctaccgagctttgtatgctcttgatcgaagacaattttggagagctctttgccgtgagtcatcttgtgcacacgctcgggctatcatggttctctgcgacagcggggaaggaaccgggctaactagtcaacttttcgcagcgcatctttaccgtccttcaacgttatgaaagactgactctccctcggttgagattctacgctcgcctgacagatcgccaattgcaccatggtctctccgctatgatccagcaccacctgatataccacttcacttccctcgatgatggcaatacctactacgaagctaatccacaagccgcatactccctcgtgcgatctggaaagattctccagcttgttgaaactcgattgggagaatacgcggctcaggtgttggaagcaatcatgagtctcggtcactcctcgatcgcccacctcgagacgcttccggagcttcaatccaagaggcagcgcattccgaatggggttaatcagggtgaaaatacggtcgaaaatacggtcgaagatacggtcgatgggaacggggaaaaggaagaagattcagctgctcctaacggcaatcatgttgtcagggaaaaaccggtgcaccttcatcccaccttgaagagtctcgcctctcacggatacatccatcgtcttcgagaggcacatttccaaagtccgaacgacaactggatagatgcttcccgaatcatcgcgtcaagaccagatgtcaaacaaatgaaaggcaaacagcaagcaacggagattgaggagaaggcgaaggacttggtcaaggaaagaactgaaggagatctgagcaggggcctaatatacaacggcctccctcaaggcgccaaaagaaaacgcgatcatggcaactcggagtccaataagcaggcgcctaatggcactaacggtgtcaacggggaccatgtagaggacgagggggaagaggataatgattggtcggaagatgaagatggcgttgattcaatcccaatggatgtaagttttcctttttccttgccacggcttcgggtcaactaataaccattaccagtctaaccttatcgttcgggtgaactacgagaaactcgacgtggcgcttcgaaacacgcggttcctcgaccttgctaagcaagatgcaccttccgcctcagttgagatttatgactgtctgcttcgtcgcattgaataccaaacagcccgctgccgagactcttatgaaatccctcgtgaaggagaagaaggcgagcaatattctgctccaattcaactgagctcaatcgtcgaagacgttgacccgaatctggatcttacaggatgtattggcccgatggagccctcaacggtgttaaaccgaggcggcaagcgaccattggatgatgagacgaatggcgtgaatggtgacgagcatgaagatgaaccgagcgggcagaaccgcgcctatggaattgaccagcaccttagtattctctcacaacctcccttgaaccttaccacaaaacacgtcatctccgggctcccaacgtggcgagttgcattccgaggcctggcccgcaagcttcgccatttagaactggagcgcatgattgaatcacggtatggagatgtggcactgcgggtggtccgcgtcctgcatgccaagggtaagcttgacgagaaacggctccaagaaatcagtctcctaccctttaaagatttgcgccagacgcttgctagcatgcaaactggagggtttgtggacttgcaggaagtgccgcgtgacgcacagcgccagccttccaagacaatctacctgtggtactacgatccagatcgagtgtgcagcagtatgctggaggatacgtacaaagccatgtcacggtgcctgcagcgcatcaaattcgaacgtggccgcgagagagattttctcgagaagacagaacgaaccgacgtcaagggccacgaggaagaattcctctcggaggcggaattagaacatcttcgcaactggaaggccaaggaagccttgctgctggcggaggtatctcgattagatgacatggttgctgttttccgtgattattgatttgctatgtttatatcatggaggctgggaagtaattggggttgcataaatctgtacaggcgaatgagcgacgaattgatacaaatgacatttccatgctcgttctgcgagtctatacctcagacatatgttggagatatgtagccatgtttccaaggtcgctccttccaggcgtagataaggtactccgttgccttagtaagtagcatacgctcaccgccacaaaaggaatgaatacatatctcagatgtgagaaacaggctttgtctctttagctttgtctctttagctttgtctctttagctttgtctctatgtcagtgcaggatctagaattcagcattcgtccaactctttgctgataagaagctatgatgaccttcaaattacccatctctggtatttttcatagggctcctttgtgggtattttctttttattttatttccttgccttcactcttaatatgattgatagatatgataaacagccttggaagtgcacgttctatatgttataaaataatccagacattttgtataacttggggccctgttccacgaagatcggcagccccgcgtcataggcctttcacatgcaccatttagccaagaatatacgagactagcgttgaatactttactacttcgtataggcagcaaagaaagggaaaaatagcgcaatgtattaatagagaccaggcggcatagtagtgtctaaacggtaatcaaaggacatcagagaggcgcattaggcagtataaattcaaaacaaaccggcaaataaacagtcaaagaatgcgggagaaaccaaaagtggtacctattcaaggcagaaataaacccctacgtcagccctattggtatcaaaatcgccaagtctgtaaatattaatgacgctggcgcgacgccggtggctgcccgatccctgcgccttgttataccttgccataccttgcctggggttcctacaaaaagggtttttttctgacacaaatccacagataaatttatttcacattcatattcacattcacaacaacataacatcctatcgaagatggccctcccgtggatataccccgtccgaatcgcccaagcactcttcggcgtgatcgtgatcggtttgacaggatatggtccgttgcttcagagcaaattcttgaaaatccatgacaactgacaagtctctagtggtttcattattctacaatggatggtcatactcggataccgtcaacttcctcctcttcctcggttgctggactgcctttgtagcagtgccctacctcgtcgttgcaccgatatggttccctcgccttgcacaccgctttgtgattccggctgttgaagtgatcaccatgatcttctggtttgctgggtttatcgctctgggagcgatattgcctgcgccgaggtggtgtcatggcagtgcatgcagctcgctccaggcagcaacggtatttggggctattgaatggtgcgtgtcttctacttttggttggcgttatatgatggtacatattgacagagagctaacaatgatttgtgtggcatatagggtactttttgcggtcaccagctatttcagtattgtcgatcttatgcaccaccgcggggcagaagcgaaaacacatacgaatgtgcagatgggagtctgaagtgtttatttgacttgatttggatatgataccctttgaatagcgacctttatgtttatcttatgaatttcaaccggatcataggtctaacatgtagtgtcatttttatgactaactagtagtagctccaaggttaatctccgcaaacggcaacccggccccgccaagcccgctgccaagcatgtggctacatgattagttgccacagtagattcttatttcaggattgacaagaggaatatagaggattaactagttggatatatcgcgtggaataagatgtacatgtagtctattctatgtacgtatccttgaatgtggccatttatctcattgatctgcaatgcatgataagaggcctcggaacattcgggacctggggatgccaaagacaaccgtggatctttcaaagcctcgaattatcagcatcgtgtgctttgtaatgaagccgagttgcaagagccgataagctttttatgtaactaggtacagttcgtggtccacgggtacatactccgtagttaactaactatcgcttccaaggttacgtacaacataagccgtcttaccaccccacggtacgccactcatcccacccgtgcccaggtgggaaccagacagaaatttctcagacagaaattgtaggattttaggtatctttacatggtatacctatacaaaaggtacataacttgagatatacgtaataatagatatcgtataactaatagatatagtatcaaggaggcctgttctatttggtattgtctctaaatggcagctcgttgatggctatatacatttcttagttatgtatggtattttatattctccatataagatatctagatttattattagccaatcaactaaacgagaaatttatcattcttcctctaactagccagagggagaaaataaggtagtattaggtatacgtaccttatatgagtgggctagttatacaaaagataactaattctgacaatttctgtttggtgagaaaaattttgtttagtgggacagacccatacatttccaggtatgggagcggtaagatcaaaagatgttcggacgtagtactagtctcgtgtgttgctccaccgaggaaaaagcctgtcttcggacttcttttgcctcaatcgagtggatacttgttgcagtctctcagatcctttctttcctctctttatcccatcttcaagccaccccctcttgccctagcaaacatggctgacaagtcagagggaaagatgagcggtgaattgcctgtgcaagtccaagcacagagcattgcctatgatatcgactatgagaagttcggtgcccagcgtgaggcgaacccgctgccggatctcaagcggcagttgaagagcagacatttacagatgattgccattggtgagttatgatgagctatatatcatcgatcaggatcttcaggctaatgctcttcgaaggcggcacaataggtaccggtttattcattggtagcggcaccgccattgctcacggaggccccgtgggcgctctcatcgcttatatcttcgttggatcgatcgtgtactcggtcatgaccgccctcggagagatcgcaacatatatcccgattcctggcgccttcacctcgtacgctgctcgcctgattgaccctagtttgggctttgctatgggttggatctattggttctcatgggcatcaacatttgcgctggaattaactgcaaccggtttgattatccagttctgggacagcaacattcccatcgctatcttcatcggcgtgttctgggtcgtcattatcgttttcaacatgatgcctgtggccttttatggtgaaatcgagttttggttcgcgagtatcaaggtcattaccgtgattggcttcatgatcttcgcgatttgtatgaatgccggtgtcggtaaagaagggtatctcggtttccgatactgggtgcacccaggtccattcgtcccctacttgattgaaggaaacgattcgttggccaagtttgttggattctggtcgacgcttattcaggccggattttcctaccagggaaccgaactggttggtattgcggccggtgagaccgagaaccctcgcaagaccgtcccatctgctattcgcaaaaccttcttccgtatcgtcttcttcttcatcctgacaatcttcttcctcggaattctcgtgccctctagcgaccccggtctattggctagtcagggagatggtgcttctgctcagaacgccaacgcttcgcccttcgtcattgccgccaaccgtgccggtgtcgcggctctccccagtatcatcaacgccgttcttctaaccgtggtactttcagcggccaactccaacgtctacagcgggagccgtattctggtgggtctggcccaggaaggtttcgcccctcattggttcaagattaccagcaagcacggtgtcccttactacagtgtgctcttcacggcggcctttggtctgctcggattcttgaacgtctccgatgcaggtagcacagtgttcacctggttactccagatctcgggtgtggctggtttcatcacctggtcttcactgaacgcctgccaccttgccttccaacgggcgcttaaggctcgtaacatctctcgggatatcctgccttacaaggccatctggcagccctggtactcgtggtatggtctgttcttcaattgtctgatcattctcacccagggattcactgcctttatcccgaacttccaagtcaaggatttcttcatcaactacctgagcttgattttgttcgtggtgctatatgcgggacacaggatcatttaccgacctccctttgtcaagcccattgaagctgacctggataccggtcgtaccactgctgataatgagacatgggagactatcgagccaaccacatggcaaggcaaggcatggaagtggatttgcgattaattagatactgctgatctgtatattagttttttctttgcatattgcatattgcatattgtataggtgttatctttttctttcttttttcaatgtttatattccaacaatatatctacatcttcatacattatacttatacaatataccatctcggtccatgtgaaaatcagtgcatgtgagttgtccagcaaattgggtggaatatgtaagcagctccactcgggtaggtacctgagatactatatgaggtaccactctgtggcaagtacccaaaaacagccgaggtcccttgttcggctcatgtctttcatgtcccaaaagagtcggttgctccgggtttgttgcgactccagttttctcccccacactctttgccccctttaatatccggatcactcgggcattccttcctttctctcttttcttactcacatagatatccggttcgtcggcctgttgttatcactcattctctcgctgaccacagatcgctatcccgctagacatgtttttctcacaacctacccatttggctaaggccgaggagctcaagcaagcaccccccaaaggcgtcgcttactctgtggctcttcccggcaccgaacagcctggccgcagtccggtataccgagcatggaatgcgcagaaggaacttttgacaacactggaccccgaggtacagaggcgcacgcgcgaatgttagaatatctttatactgactgattttaggtcaccacggcccatgatatattcgagtcgaccgccatccgccatcccaagaatgactgccttggttggcgtccgtataactccacgaccaagtcctttgatccataccagtggctcacttacgagactgtgcagaagagacgcgccgcattcggtgctggtatagtagagctgcaccacaagcacgactgccatcgccccggccagtatggtgtcggtctctggtcccagaaccggccagaatggcagatcactggtgagtttaggttgtgagggcgaagaattcaagatattggacgctaaattgaaatcatgtacagatctggcttgcgtttcgcaatctctttactccgtctcgatctatgatgtcctgtccgaagacgctaccgaatacattatcaaccactctgagctgagctgtgttgtcacctctctacctcatatcgcctctctgatcaagctcaagccttctctcccaactttgaagatcatcatcagtttggacccattggatggtggtgagcaggccggtcactcgaagcgtgccatcttcgagtctatggccgctggtctgggcctggcgatctatactatcgatcaggttgaggagctgggtttggcctcgaagcgcggttacaatcctccttctgcttcggacattgtgactatcaactacacctccggaaccactggtccccccaagggtgtcgttctgacgcacggcaatgcggtggccgccacgtcctgcggtctgatcactatcagccaagcccgaggtgatacgtcggcctcttatctgccgctggctcatatatatgctcgtctggcagagcacaccgctttctggggtgctgcacggattggttatttccacggaaacatcgcggagttggtcgacgatttgaagttgctgaagcccaccggtttcatgtctgttcctcgtctttacagtcgatttggtagcgcgatccgtgccgcgacagttgaacagcccgggttcaagggcgctctttcgcgacacatcattgcggccaaaaccgcgaacatgaagaatcccgatccttccaaggcgaccgtcaggcacgctctgtacgatcgcatctgggctaagaaggtgactgccgctcttggtctggagcgagccagatacatggtgtctggctccgcacctttggatccgaccctacacaacttcctacgtgttgccaccggtaccgacgtccttcagggttacggcttgaccgagtcctacgcttcagctaccgctcagccggtctacgatctgactgctggcaattgtggtagtctcgcaccctgcgtcgaggcatgtctggtctccctgccagacatggagtactccgtggacgacaagccgttcccccgtggtgagctcttgctgcgcggcaacaacatgttccgcgagtactacaagaacgaggaagagactcgcagtgccatcaccgaggatggctggttccgcactggtgatgtctgcacaatcgatgagaaaggccgcttcatcatcattgaccgccgcaagaacgtgctcaagctcgcccaaggcgagtacatctcccccgagcgtcttgagggtgttgttctttccgagctgggctacatcgcccaggcctatgtccacggcgatagcttgcagaccttcctagttggcatcttcggtgtcgcgcctgacctcttcgctccatatgccagcaaggttctgggcaggaccattgcgccaacggacttggaagcggtcaaggaatctctgaacgacgacaaggtccgccgtgctgtgctccgtgaccttgagcgcgtggctaagaagcacaagtttgctggctatgagaggatccgcaatgtctctctcaaggtggagccgttcaccgttgagaacaacttgctgaccccgacgtaagtttttttcttttttttttccgtcgccgtaatcctagcattgctaacattattttctcctttctatagtctcaagctcaagcgtccccctaccgtcaaggtataccgttctcttttggatcagctctacgagcaggccgtcgaggagcaatctgctcccaaggctaagctgtagtggctccggcacttatttttatgcattattgttttccatcgtgttctcactgtggcatttggcaattcttcgcgggctcggttcaagaactgtacatagaacctgtctgtacattgtagtatattgaacattctgatagagttttggtccgcgctaccctcctctggctgtaggctactagtactagtttgggccggtcttctagcttttcttttgggtcttccttgtgagagctctttcttcatatgctgcttttatactttcgtcttttgcacatccttttcttataggtcttgcacagggcgtactactctacgccacactatgtccaacaaaaagaaaccacagtccttacctctccactgacaccataaattatcataatgttagactagctaacagaaaagcaaaaaaatctatgtccatagcctgtaaaagaaacaaaaaaacaaaaagatatgataagagtgggatttgaacccacgcccctttcgagacacggagacagttgtataccatcgggatcaggttaacctgaaccgtgcgccttggaccaactcggccatcttaccaagctatggaagatcgcagcatctttggatctatgaatggaaatggcgaaaacgaagtcgatatagttcagacactgtccaatctcaatgatagacggggtaaaaggattaagatgaatcacacagaataaaaatcaaataaaaatcacatttatcacttccatgcgaagtaatccctatcttaatatgctacgtgaccctgaaccgcaaggagaatagtcccagagccgtaagacaccggccataagacgccgaaggaagatgatagcaatgatttccgaagacaaagagcagagaaacaaaaacccatccagtaggaacgcttcagacaacaaactaggagaccctaactctataaagccaatatcacatactcataccctcattatctgaaatgaaattgaaaaaaacaaaaagatatgataagagtgggatttgaacccacgcccctttcgagacacggagacagttgtataccatcgggatcaggttaacctgaaccgtgcgccttggaccaactcggccatcttaccaagttatggaagatcgcagcatctttggatctatgaaggaaatttacctcacgctatacaggccatcaatatgttgtcgggctgagcgttgatccttgggtttcgggatatgatagcgcccatatatcattattcaaggagcgataaaatacactaacttagtatttagttggccaggtaggtcatagtcaatttttctatatatagcatgttcatcctagagtacggagtatctgcagtgcctatatatagcttaagatctggtggggcctatagagagtcatcattctaacattctattctcacttcccccaccagcattacgcccaatcctcgtttaccttatatttcattttaccttcttggccttcgcttaaaacacagctggaataaatggccgaccactccgagcccgatatcgtcttgtacgatttggcctgtactaagcacgtcagcttttctcccgttgtctggcgcattcgcctcatgctcaactataagaacattccttacaagactattttcctcgagtttccggacattgaacccacgctaaaagaactgtgcgttacagattacccttgtgttttcatgctttccagcactgtttacacgcgaggaaacccccagctaaccccgaatcaccaagtggcctggttccagaaaagtccgcatcgggatccaaatacactgtccccgcaatccaacatgtgccaaccaatacatacattatggactcgctcccgatcgcgcagttcctagagtcgatttacccaaacccacccgtaccactaacatcagaacttggtcgggagatcgagaccaaggcacgcggtgtgcttggcaaggccatctactcgtcagtgatgccacgcgagatccgcatcttatcgccacgctcacaagagtatttccggcgcacgcgcgaagcctccctcgggcaccgtcttgaagatctccttgacgagggtaaagaagagcaggtctggagtgatgttagcgccgccatgggcgctgttggcgagctgatccggacaaacaaggcggacggaccgtttgtgctcggtgcgcggccaagctacactgatttcttcattgctggatcccttcagtctattagagtggttgatgaaggggtgtttcagaggatgatcgggtaccctggctatggggaggtttatgaggcatgtctgtcttacatgggaaagagggattgattgaatcacggtctagactactttcaatgtattgtcggtcgggtcaaatgtcggtcgccaaatctaggaggtacacacaaatatgaagtgttggtcaggcaatgccacgcttgctaatttaattatacaagtttgaaggaaaggctgtgactttgatgtgcatgtatagccttggatatatatatgttggtctgtcgatggtccaactgcatattaacaacggttaactgaaggatatattactcaaggatagtaaagcaagatacaattatagtgttgacttataccacctaaggagttgacaagtaaagcagtataatgaatagcagcatgtctggttctgaaagcctgatttagtcatggggtcaggatcttattagctatctaagattttaagaataaaaaaatctctttaatttataaagctatatactatttttaagtacctaaggctaccttctaccgctacttctaggatatttaaaactagataattttatatactaacttattttgcggagcgaagcgaagcaattaaaaaaaataaccctctccccttcctagggggggtcgaatggcccccggagggaacgcctcgaaaggagatcatgtgaccaggcgctctctctactgggtcgaaaaaaatagaaatccagtcggtgaaaaagtaatcgctgagaaacggcagaatagatccagctggcagaaaaaaaaacaatctatctaatcagagtatatactaatcctaatgcagttagacaatagtattatgcgatatctactctgtagttagtatatagctaggccttcgtatctttctctcagctataagaccctacctatttattattatggattctggactatactctcaatatcggtatatacgccctatatatatatttcacttacatacaaatcgagagatccaatcgagagcgggcgcgaaagtggtttaaagtagtggtatagaggaagaaaaacaaataatgtagtttgtcttagacgaaataaatcggaaaattttttttttttatttacactgtttacattgtttatttacatatggcggcatgaaaaaagagcagttagtcgtttcgttctgcacaactatctcgcggccgcaggccggcgagatccctcgtattctttaaaggtattaagtactatatagttctctaagtcttctaatctctcctatatctattctatatatcttnnnnnnnnnnnnnnnnnnnnnnnnnnnnnnnnnnnnnnnnnnnnnnnnnnnnnnnnnnnnnnnnnnnnnnnacctatttattttatttacactgtttacattgtttatttacatatggcggcatgaaaaaagagcagttagtcgtttcgttctgcacaactatctcgcggccgcaggccggcgagatccctcgtagaatgaggatctgccacgcacgaccctaaaatgtatcaaccgcccaattctacatcaaaacacgaaaaacaagtcaattgagccgagaaaagctttagattgagaaaaaaacaaaaaagtaatatgataagagtgggatttgaacccacgcctcttgcgagaccaggaaactattgctagttgtagagtcaaggtataccttaacctggcgccttagaccaactcggccatcttaccaattcatgaaaggtcgatgagattatggctatatgaccggaaacctgtttcagctatcctggagtaataaaacctggagtctatgaattgaagtcaaagtactggagattcgagggtaatatacaggatagaatgagcatcaggctagttctgtagtggacttcgatccgtgaagcgatgataatatgggctaaagcagggcctactgaaggtcataggcatcgctagccaccttgtcccgtcaaatatttgccaacacatccaaagatatccggacacatccaacaataaatttgcctgactattttgattcaatcacagcgagatgggagacaattggacttgtcttcgccctattgggaacagcattattccatacacctgaagatgacccggtcttcacacatcgcaacccgtggaaacttgcaaagagcaatctcagaaataccgcaaccgccattggaaatatttgttgccaactttgcaatggtgttggaacgattagcgatccattttgctggctcatgacccagaactagttctcttgacttcgatgtttggcaacagcggtaatcaccctttaatagtacccactggaaaagaaacgaatgactgaaagtcggatagattatagggtctggcaaaagctcggcgatctatctaccattgtttacgcatttggtttgcatcaatccggtgaagacatcaaagaaaactttccgttcttcttggtggagatacgaaagcgagtcatggtgtgcgcatacgcaattgataaagagttagcgatctctttggggcgtcccccacggatatgctctcgatattgttgtattccgcttccgttagacataagttatgacaagatgatcatcccacaaagcgaaggagaaaaggaaatgcagaatctcgacgcgcatggttggaacaccgaaggaggtctgaccgttggcgtcaggctgcgcgtcgtgctactaacgagcttgttacgggaaagtatttagaattgtctttgagtcctactactcaacatattgcagccagagttgagttcgtatcccattatagactttcttatattgataaagtgactgacaaaagaaaccgcacagaaaattgattcagcaatcccgccagatgcaaaaagaccttcccttattcttgcaacggtcccccgaagaagctgcagcaggtgcttacagatctgcacgagacgaaggccgtgccttcgctcacatagaattcacgtaccaggagtttctgctacatcggatcttgctcaagcgccttgggatcaactcgcgaggactcatcgaaagctctttggaaatagttactactctattagacattattgccatgcagacccagtctgctcaattggtggcgaatatgtcgtgggatgtaagtctgctctggccccctcaatactgccatgaaacgtttattataagctcatcattttctagttatgctatattggtcttcctgcagcaggaatcctgacttcgaaactgctctcggggcatagccctcagatatcgaatctattaccagccccgttacctgccaacattcgttcatttgctatccaaaagcttaatctttttgtctctcatctgatcttcctggtacggccgcacgaagggagttacgagatgggagttacgagattgcccaacaagggtcgagatttattcgtcgggtgctcgatcatattatttcacctaaatatccccaactgcctccggtgactccggatattgatctgtctgaaaattggctcgacggttgtgatttggatggtaatcttgatttcatggcgtggcttgacaacatccactgggcgcaggaccctttattaaatttcacctgactgaatcatccaatatatgccttcatgagacgcacatcaggattatgcttctcgcaacactaccttcggccattttcaaggtctattgttttcttctctttgaataaactaccgctcatgcggattatcctgtattatgtacagagctctatacggcagaagggctgctctaggaaccaaaattgccaagtcgtctaatacaaccgagctttgaacttatgtcacgtacatagattcgaatagatctaaaagagcaagaatttgtgtcataatctgtatgattatcaataatgttactctacggatcgtgatcattgtttgcttgtttgcttgtttcttattcgctattcgctatttgctatttgcttctttattttgctcatatatttcttgcacaatacctagccagagtgaaataaagccagaaggacacagagataaacctggcggctaggcaggcaggtacccctccttcgcaagactaatctaagcgtgaaagcgtaagcggctaatttctaggggagatatctcctttggaccgcgaagagactggacagggtatatttcgtaacgttgaatgtcaagtgactgaggcggatcaccagcaggcatgggggaaataatctcagtctgcgtgcatcttgggatcccttgacggtcatttctgtaaagttcgaggactccactgactgagttattggcatgcttcgtccacttaacaagaataccgattttgatcgctctgtttccactaatgagtaaccgattcatgtcatcaagaaggtcattggtattggtagctcaggggaaagaaagatgatatattattcctctcgtgggtaacagtcattatacgactcgctccatccaacctctgcgacaagagttggaaaggcctgcgatggggtgtgaagaaaagcatctggctcctttcggagcccgcgatttggaccttctgtgaatgacagtgctttggacatagtattagtaaggttacgatcaaagtcgtcagttgaactcacttgtgcctatctgaagaaggagaaggtctagctctgctaggttcaacctatcgtgcaggctctggaaattgagactgaaatccattcgtcaatacaattatgggcataagttagcatcattttgagtcgtaaacaacggctttctgggctataggattttcgaatagaaggaagatccttctcgacttcccagaggaaatcctcccaccctggtggcatgtcggtaatcaccagctcatgaaagcccttagcctcacgaagagtattgtgaatagcctcctcgaactgtggctgtcttgaactgatctgcggagaccacagtccacgatgagacgctcgacggagctaaagaaatattaggcattgcgatggcatggggacagaagtgatataaggcgagaagagaagagtagggtgttgaagaacagtatatgtattgcaactgagcggctcatagatggcgtgttcggaagaacagtttatccagacccggaacggatggtctatcacatttgtaggaacgctgatacggatggtaatatgcttcggagacaggcggtaaggagagtcctagtcggatgttgcatggtggagcaatggggccgcctcattcagaatattatgtggcgtatttgattccggcaacccgagcagttgttgaagtacttgttgaagtacttatttaagcagttgttagagcagttgttagagcagttgttgaagtagttgtcgttgaagcagtcgttgacgatgaagtagttaatgtgataaaagtgtgtagtctaacactaaccgtaactagttatagttagttagagggcggtaagctgagtcccggaaagtcaggcaggagggggggttccttgtcacaatcccctagtgttagagcacagctttcgatagaaaaagggaaccttccaatgccaagtgacttccaaacgtgaaagaccactgaggcaatccctagctatcttagttactaccaatgaaatgatcccatggatgatcgctgtactgtctttcatagcaagggctccattcccaaaatgacatatggtattttagataaatcaaattcaatgagtttccttaagaggccctccacagtatattatctatagcttaagttttatcttatagattgcatctcatactcctcctcttcctccactttcaacttttgcggttggcgaataatcagacattgcgagtgctggctatcctgcgagtccgactgccgggaaataggcatatcaacatcgtccccctcttctcggtttattgagcaggcatgagattggttggtcaatgcactattgctagttggtgtgaaatacgaattttggcccttgctgttcgtgacgccctgcccccatcctgtgttgaataaaataacaaacggcttcagacatggcacagtggaaaccataatgctgcagtggaggagaacggcggtcgcgattattgagtccgatagatgcagaggcgcgtcggtatggaaaagcgagcggttgagataggtttggcggagtataatcaaaatgataagcctaaacatctcagaaacatgattagccattgtagttcttaattgccttcatctttgtgatatcagaactcacggggccctcgtcccaaacgcaaaaaccacctcccacttttgcttccatcgcatctgaaccccccatactagtgaaacacacagtccaaaggcaagaatatcggtaatcacatcaaaaacagtgatgattttccaagaaatcgcctgatctcacttgtcagctgtgttgctctatgtgagcaagtataacgtacaaaattattacaatgttgggccatggtgaattggtatcgtggaaagcaactcagagcaacagcaataatcgaagcagacatccacaccgtcactatgcccagaagcatattggaatagagcaagtatctctttttctggcccagttgtttgagaagtaaacatatggaaatcttggccgcgccgtgcccagcaagaaataggaaattcgctgcataaacgccctgaatcgatatttgttagttcctttttcttcttttatttcatgcagctttgaaggacgagattggatgttcagggaagagggagggcgacttttccagcgcgtatcaagttcgacggagagctttggccctcaggtcggcctaaaccatgagaaactgcatccatgatgcttccgacgtgggcaatggccattatctagcaagtacccgatcagccttagagacatgtcgacagaatttaatgggtgatgagattgggaaaaaaagggagggttgaaggaggggaataatatagacttacacttccggtaaacactacgacatcatcaagcttaactggtccattgaccgcgagacgcatgtatagtcggaccaaactcactatgatcatccacgtcatgaacagtgtttcaacgatgacaatcaagccacttcgattcgtgacggagactgcatagggggagacggactccatgggggcgttcaagataggcgagatgccacgacgagaaagcagagatttcacgatgggtcatggttataacttttgagagatactggggccatatttgccgcgaatgaatccgatgattaaatgagcgacaggggtcctgatagacttgatatcttgtacatgcaatcatctcccgtaataagtgtttgtgatgcatattcgaacgctatataaatcattttacttattttaaagagcagctggtcacagcgaattaattaatttaagatttaataaattacagcatatcttagcctttcagacccgaactcgattctcgagaaaagtctgatctcaagtaattatcgctctcccagtgagattagtatgcaaaggatatatatagtaatgggttaatgggttgatctgaattcagaaaaactagtatgtaaagatctaaactaggtaataaaaaataatgtattcagcacaaagtacggagtactccgtacagcctggacccatgtagttgcgaaaattagcaccagtttggtggaccttacggaacgcacagtgccaatctcggaggaagtgcaggttagtataacgatgcaccctatcagatgatcctaatatagtgcatatatataacgtagctgggattgttattctgaatggggccagatttcggcgggacggctggaggcagaccgcgggtggtacttgtgcttaaatgccccacccaagcccgaaggaagaaagattttctctttgaactaattaatcacgcaaaagagcttagtttacggagtacctctagtacaaatacagctcgtgggtcggggtggagtatgtactatgttgtatatggtgtttgaccgtgccctaatgcatcgtacttcggccgctgccaaccacaacccttgcttgttgaccagggttcgcaagatacaatatagaaaatattattactatgctagcttttttcacgtctcattatctacccctgcacgtacgttgtattaatttatttttctaaccgaaaagcactactacattctcgccttagttgcactatcattgaaaccgtattctcaattcctttatctactttctggagctctttctttcctccattttactgatatattcttcagatccggttcatttattccccccccctcattaatccgccatggggcgcgagaacggaatcatgttgaaagttcaacactccacgccggagacctcctccctggacctcccctcccagaaggcaggcacagtgcaggacaaacaagacatgtggcgagccgggcgagatcaggaactaaacgtaggtaactttattcaacctttttgagtcctcctttccaaatcaccaaaatcagagaaaaagaagaatgaaaaaaaatgacacgtcctgcagagaaatttccggtttctttcggttcttgggtttacggctgtacttatgtgcacatgggaagcagttctcttgtaggtctctctcggtaaattgatcaatgccttgactaggataaccgacttcatatattggatctgtgctgacctattgaataagtggttcatcttatgggttgactaatggtggcaaagggggtatgatctatacttatctcgggggtctggcagggttcagctttgtgattctctcaatggctgaaatggcttccatgtatgcatatcacaatacatgtcttggcgatgagattgctaacctttatttcctctctagggccccattgtccggcggccagtatcattgggtatcagaattcgcaccccctagttcccaggccctattaagttacatcactgggtggatttgcgtgttgggttggcacaccggtatcgcaggatgctgctatacagtcgccaacatgatggtcggtgtggttgccataaattaccctgacacgtatacctatgagccatggcatgtcacacttctagtcattgcggtagccctggtagccttgatgtttaacacattcctggcccagaagctccccttgatcgaaggtattatcctgattgtgcattgcttcggtttctttggaatcttgatcccactttgggtgttgtcccccaaagttcctgcctccgaggtattcggttcaatagaggaccggggtggttggggtaacaacggactctcctgtatggcggggctggttggtcccatctatgcattgattggtatgtccgcgcgctgatggatcctattttggctattgctaacgacatatgcggagaaggccccgactcagcggttcatatgggtatgtatcctgttattccccgatctatgtggggaaataactaataccagaatgcagcggaggaaattcgagatgcatcccgggtgctccccatgggcatggtctggacattgatcctcaacggatccaccggcttagtgatgataatcacatttgcgttctgtgtgggcgacattgatgcagtgcttgagtctgaaacaggctttccattcatccaggtcttcctcaatgccacaggatcagttagcgccgcaacaggcatgacagtagtgatcatgaccatgcaattttgcgcggcaatcagtaatgtcgctacaacctcccggcagatctactcttttgctcgagacaagggtcttcctttttccaatttcttggcacaggtgagttctccgacacggcccccatccattgctctaactaaaatgggggacaacaggttaacccaaccttcaccgttccactgaatgccctttgcgtcagtctcgttatcgtctctctcctctccctaatcaacattgggtcttctgtggctttcaatgctattatgtccctcggaacagctgcccttctgtcctcctacataatttccatcacttgcgttcgtcttcgacgctggcgcaaccagcccctaccaccggcacgttggagcatgggaaagttcacccccatatgtgacaccatttccatcatggtgttgctagtgatatggatctttagtttcttccccttgactaaggatgtggacccgactactatgaattggagtgtggccatctttgggggtgttgttgcggcatcactcggttattatgtgatttacgcccggagagtctacaaaggtccagtgatacgggtgaggatgttgcagcgatgattagtcatcaagtggcttcctggtcacgtgccaccaaaaggcggtgtggatatgaccgccctggccctcggcagaatccccatcgaaaggcctgagccaactggagatcgacctgattgagccatcggccgattgacagttcagtatggagcaatcatgtatccacttagaaatctagcaattccttgttttctgccgctctgccgtctgttaaaaactaggctgtcctgtcctgatgaaaatcatcagaattccctacctacatacatctcatgtcaccgccagagccgcaagctggactacccaagttcaaactagcacaagagagggaactatacaagtatgtatgtgggcaggtttccactatccccgagtgtgccggatcgcaaactaagactctatattaaaaaaaagatatcttaaacccaacgaagttttccaacctggcccaggcacgagatatgaggatgcacagaatcaacgtactacatatattccccgcttatcgccagacacagctttgacggccttcgcccaattaggagttttaaggttcaaagctcaacgcgccttgatctcactcttcggtcgggaccaacattacatcctcgcagaggccactcaaacccttactcttcaagatcatacagtggaaaatgatcgagatgccttgtggttgggttgctgcgttgtccccaagggggatggaatctgtcaacaagtcgcttccctaccgcaactcaaaccagaggataaacacgtggtagagggtatatacgtggtacctgatctgcgcgaggatgatcggtttaaccaattggacatggtcatcggctctcccaaagcaaggttctacgcaggcgcccccataatcagtcctaaagggatcaccatcggatcctactgtattatcgatgacgagccacgatccggattggacgccccgttggtaaggttcctacaaaatatggcatcgaccgtcatggagcacttggacatggcccgatccacaacggaacatcatcgtgcagagagaatgattgtgggactcggaagttttatggaaggtaaggcgacgctgcgcaatgagtgggtacaggacactggactacgcctgaatgaacagcaacataacgaaggccacctgaatatactgcagcaaaatgtacaaatcaaatctggtcttctcacaaccgtccatactcgcccgtcatcctcgccgctgcagccaaaattatcttcacagaatggttctgagcaatttatatcatcctcatccaatttgtccagtgtaccatcgcagagcctctcctcaggaccatcttcctcgtcgtcaacgaccctgtctgacaaggattcaaacgccagttttgaccagacgtcaagtctcaacaaatccgaaacacaaagtagtttctccgttcgaagcacgtcgaccgagaatctacaagctgacatgctgtctgtcggagttcgacaagtattttcacgagcagctaacatcatccgcgagtcgattgaagtcgaaggcgtcgctttcttcgatgccagcatcggatcatatggtggtctcgtcaacgatacgaagcgaaaggggccaggctccgacagcggtaccttggaaagctccatggacagcagcgatgatagcaccgaatctgattctcagaaaagctctaccgcattcgggaaggacagcacaccagagaatacgaccttgtgtgaaatcctaggcttctcgacttccactacatccagcatcaacgacgaatcaaaaggaagacttgccctccgggaagtattgttgaagacgcttctgcggcgttacccgcatggcaaaattttcaatttcagtgaagaaggatcgatgtcctcggacgaaagcagtgatggaccctgtaatagctcgttagaccgtgagagttcaaagacggccaacatcgacctcactggtaaaagaggaacaggaagtcggaaaaagacgcgcagtgccacgctcaaagaggacggaattgttctcattcgactcttcccgggagctcgcagtatcgctctccttccgatgtgggattcccaccgagctcgatggttctcgggtgctctggtgtggacgaacacacctcgacgcgtcttcacatctgagactgagctcacctatctgtcagcctttggaaatagtatcatggcggaggtgcatcgtctggatgtcgaaatgtcggagaaggcgaaaacaaatttggtcagcagtatctcacacgagttacgaagccctctccatggcattcttggtacgtcagaaatactccgagacacggcgatggacgcgcttcagcacggattagtacacacgattgaatcgtgtgggcggacattgctggacacgatcaatcacttgctggacttttcgaagataaacaatttccggaaggaaggaggtaacaaagccctccacggacggaaaatccatcttaaacgacacaaaaacacagacccatcgccttacagtaagcctccacgacggacacgacatagtggcatgatcagtttgaagtctgatattcagctggattccgtcctggaagaggtaatggaaagtgtcttcgcaggctacagtttctaccacagttcacaaaggtcaacgacgatagaccgtccgaatcccatagaacttgacgtattagggtcctcccagcaagcgagtcaggttagcatcatcctggatatcgacgaagctgctgaatggagattctccacccaaataggcgcctggcgccgcatcatgatgaacattttcggcaactccctgaagtacaccaaggctggctttatattagtgaagttaacgtcatcacctgtcactcatgccaaagacgccgtgcccggaggaccttctgatttcaaggtgaccctgctggtcaaggacacgggtatcgggatgagtatggagtatctgcaaaataatctattcacgccattcacacaagaagactcgcttgcccccggaaacggactcgggctcagcattgttcaccatgcggttctgtccatgggtggtcagatcgaagtcagttcactccggggtcgtggtactgaagtctcgattgaagtcattcttacccacgtacccattcaaaatgccaacttgagtccctccaaacctgagctcattttaagaatcaaagactttacacgtggcacgaccctaggacttctggagctgggatcatctgacatccacgatcgcgatacaattctctctacctctttagaaaaattgtgcaagaactggttcgagatggatgtccatatcctgactccgtcggacacttctcccccctcatgcgacttttatgttgcggtgcagaccgataccgactcggtgaatacctgggaatcgtggttgtcaaaaactcgagatggcaatattaggagtcgaatgatttcaattgtggtgatttgtcagtcgccagaggcagcacatctcatgtctgttgcggcaaaccaatcgaaccacgaggctatcgtcgaatttatcagccagccctgtggcccgcgaaagttggccaaggcatttaacatttgcatcaagcgacaacaaggtcaggaatttccgattgggaatgactctgatatagatcaacctcaagagaagaatgtgtttcagttgacgaagtcacctctggtttccagggaggatatcgacgcacaacgtgctagagatgagatggatttccaaaagcatcaggcaggaaaacaggcgatagatgatgaatatcgcaagttggagggaatgggagactcatggcaacataatgacgctcctcttcctcacactgaaagtgatgccattactttgccaattcgacagggattgtccaggaaagaggagccgacgttgacagtcttgttggttgaagacaatgatatcaatctgcagatattggtcgcacatatgaagaaagaaggatacaggtacacaattgcccgcaatggtttggaggcgtcgaacgctttcaaagcccatcctggaaagttcggagtggtcctaatgggttagttcgtctccttgttctaaataaaggactgttctgacaagcacagatatctccatgcctgtaatggacggattcgaatctgctcgccttattcgcaaggctgagcaggaataccagaacacgctcgatatttcagcaaaaggatcatttagacctgcgactattgtcgctatgaccggccttgcaagtgctagtgctcaacatgaagcttatgggtcaggaatggacctctttttaacgaaaccaatcaaacgaaaagatttattcgcggtattgaaggagagaggcccaggcgaggccagaaatccctctcaatgatataacacattaatgacggtcatgtttcatctttgatgtcaagtatatatacgattttacttgttttgtgtttgttcttcttcccaatctaccattttgtcaagattaaagattagcactaatcgttagggtacaaaggtcgttttcaccatgtcagggcctatttagaccgcttttaggcatctgacttagtgggctttcgggtgtaggtatcgtaaattatgacagcacggaataaccaggcctgatgaccctgggcaaaagaagcttttggcaccatacaaatttaattatttccatttttctaagtgtcttgtaagaaaacaagtaagatttaatgaaccaatcataggaattggagtaaaccatttagaaaatggagataataatttgtatggcgccagaagcttcttttgccaaggctctctctgtaatggtaattcacgtatccttagttatttttttttctgccaggccaaattcagacattaaggcctcattatggtgaaaacgaccttgcgcgctatgcccgccccttcgtaattggggattctggcgggtgtgcatagcgaccttgtctctattggctattaggattcgattcatccgccttaatttctgtccttcctgatgagaagttgttctatatctatattgaggtagtcagaatagtcggccgctattacggcctctatacttaacatcgcgcgtaaggatctggccggctgcaaaagtctggcccaccttgccacgaagcaaaacagtgtgtttttggaggtgtgctaagccttgggaagatagcacagaaccgcaccaatcggaagcaagcccatgaccccggagatccgtaggaccttagggcggggatttggcggacttgacgacctgtgtttttttgtcgcctatatcctctctctccgcattgaccctcgtgtcgagctcagcttccaactttcggttccaattccctgggactggaatcgaaacatttggggatcagcttgatggagagattccctctctttttttcgcattttactcttctctgtcgctattctctgtatgttgcgattgtacagaatagaaattcgccaataagtagcccctcgagctagataggatatggctacacgtattacgccatatctaactatcatgataggtgttaggcttgcagtctgttttggccgagcagattggtcaatactgaccctttgcatacgcttccccaccattcaagcctcctatttcacttgggggtcatggctagaggggctagtctcatacaatatgagtcgtagacccttgaatggacttattatggctattcggctgctggtagttatattcggtgggaatttatttgtcatgatagcctgtcgtagtatccctgagacctatccatgtaccactagcaaggatctgtactatttaggcaggagttgataagcctaccgcttcttttttattcctcttcttcatcctctcacattatgagcggcacatcttgaacactactgtttctttcttaccttcaggcctagagataatggatggtcagcaagatgctaaggctgccattgaagccttgcagcgaaggagacttcaaaaccgtatttctcagagaaaccgtcgtaagccatcaatatcgctaccttcaagtcccgtgtgaactcggattccctaattctatgcaccccaaggcaaacgacaagcagaacttcagcaacagcgactgaaggagctagaaaaacaaacgaaagggagccaacggcaaaagaatggcaatacatgtcctcctgaaagtaataatcacgactgccagatgtgcaacttggatggaaactcccagtttgaggggaagataccagctcctgtctgttttgaagaagacataccccaatctgaaggtgtggattgcgagggttacactaacattcagctcgccaagttgccagggcgaaataagagccccagcattacaagttccattcagagactaaatgatctgatgccatgatggaagaaatgccgaaatttgtactggaccacgagcccggggtttgctctttatctgatcactttggggcctcaaaagatctagagacacatcagaaacaggcaccagaagagattctgcaatattccagacagtctcaacagcaaaaatccactgtgagccgaagctctcccgtggggatggccctatacactgaaaggatgactggaaccaatgtatctacgccgacgctgccattggaggcccccgagagcctacgaagcgttatattgccgaggacaaaggtaaaatggcactacacatcagcgtcgagcgtggtaatttggcgattgtgcgtttcctgctactatatggggttgacgttaataggagggactactctgggcggacagcactgcactacacagcacacggcgcacatcaaaattgttgcagaattactcatcgcgggcgcggacccagaagctcgtgataacgagggtagaagcccgctacatgccgcggctgatgctgagtgtgagccaataatacggttgctagtgcgagagggtgcagacctaaatgcagccataggaattagcggtattagcagtagcgaggagggggatatgcctttttcatggtggattgagccgatggatgcatgttcataattatatgaaacgagcttttttcaaatacaagaacagtgagattatgatttgcctttgattcaaagtcacgattcaacttatcttaaactaaatagaccaacgatgaaagcttaagtagtgcaatgacaaaggttgacttcgtccagttcatgtagcaaatttcgtatcgggtcagcactccctatgcagtattgcgtgctcgggagagtagggtgtagggtgtattctcaatccagtacttttcccttactgcgatgtaacataacggaatttaggtacctgaagtatcgaattggggaccgggctttcggtttagttagatcaatggaatttatcgctagggggccctgattttgtgatatgcattcataaaaccaccaaaaatagattcgtttgaacaaaacaaagacggcaaacacctcatataaatctgagagataatcaagagttgttgtaaagtaatacatatatataccaaggactgcattctcatttctggagcattgctataatttacatttttgttgctcagtgtaatatcaaatggaccgacaataaaccatccaaacaattgcaatagtgaaatagcatcaaattttagctactattccaagtgagagatttgacagtccatggttcgaattcaaatatccctgcccattacgtacgtatacataggaggttatcataatgcatccctttgttgaagacatgtcatgtcatagtacattatgtgttttttgggtagagacgagcaatgtcttcgggtacacagtatctgcccctcacagttccagagactgtcaaaacttttacaccgacgtggcgcgtcaatgggtttccaccttcctagcccagatcccgaaacggggttattcacatcccgctggaacaatactggtgtcacatcggccatgcacttcaccatattcatcagcatcatgttacagtgacgggcgtgaatcttcatgaagtcttctgtcctgttcagtattgtacggaagtcccactcattccgatgtgcgaagagccacaagacaccaacacagtgaacctgatgcattactggttcaaacttagcttcgggcctgttacaagcaggccgaaacggtggctaataaagggttggctggtacttgccttcagacatggcgatgacttcgttgtctcgtggcggaggcagactccaccattcatgggtctcggttgacttgttgatcaagcttagtttctcatatggaaagctaaatcgcccggctgtattcaagctctagtgtcagagattttcaaacatgcaaggccacgatggcttactcttccaaagatcgtcccatgcatcccgacgatcctgggtaggtaatccaataaattcatgagatattagatctgagttgtattgtccccattcatattccaaaaaatctgcttcggggccttgtattgtcagttggattttgccatagctgggagatgggaacctctcttactgaatgcccacattcgccgttgacacgatgcatccgttgccgcgaaataatagcaaatcgtataaaacagcaaactgatgataaaaacagaaaagcatagaaaaaacaccgtagatggacgtatggagaagcccgcaagcttgctaatattttttgtttcactctccctatacttcaaactttcctcgagcagtggaaaatctgcgtcttcttcgtttgtatctgcaggattcacattgccattcgtaatttgctcgttcgcccgctctagcctctcgtagccagatattgtgagatgagagccggtgggttcagttaatggcaatgcagcaaaagactttatagttgccttcgatcatcgtaaacaagagttgataaacttcaacaaaattagagatttctcaatgtaataatgctttcatctaaaacttagatacccagcaacccaggatctcattttcagcattctgtcagctgaggcctagtgcggtcatccacggtaagcatttggattatggccatgtcagcacacaatatgcaagttttctaactactgcaatattcggcttcagattatagtgctttgcacaaatcggactgtggttcctcttccatgaatcaatgaccaccaggccttgtacattgttattcaagtgggtaggccttccgtatcgctctttatcaatactaaaatcctctcattagagtcacgtcatacactacctaggtatggctgaccgattcaaggaaaaggctagggtgcctttgctttattctatttctgcggccttggccttcgccgtacccgtgatcgtgtttcaagcttttcaaattgagccaagtgatgcaagatgtgatcgtctgacttatccctggtctcctgcactggatatggttgaataatactgggagacctttgagaaccatcagtttgctattaaaacctcgtatttcgggttcgaggcaacggatcaactagaggatatatggaatgaactacttccaggtatgccgaatgagattatttggccctctttctgcttttcttgctgtcaaatatagaaggagaccaaaaatatgagagctgaggactaaattcgatacagagcaccctataacgataccgtcttctcgggttgagagccttggtcatggaaattctgcagatgacccagactggattcgggatccacacgacaccagtaatctcctggcattgcctgaatacgctgtacagctcggctgtttgaattttctccgccaggtgggctaccgatccgatcgtgatttcacatacttgaaatcgttccaaggtgatgactctcttgtctgggcccgagcatatcagtgcatagagcgattacgacacgccatcatgaatttcgattgaattggcttattattggaattagcttactgatatctttgaaagtgctggggtgacgttggtgccgttacactattataatggtaatacaacaacggaagaagggttgtttagggacgtgtcatttgattttggaacactgcatcgttgtcgaaactttgaaacatagacgaatggattagagagaacggcgtcgtgagcgtcaccatgaataatctatggtggggaggaggcaatgtggtctaacagatgctcacactgatcacgcacttttttctgacagtacaatttaaaacatttaaaactatacttgtagtaattatcgccctataaagatcgtgtattatacaaacggaaccctaagcagccagagtaccatatggctgcgcttttattattgaaacaacgtaatcaagttgatccagtgttatctgcctcgtatctctcgatggaaatgatcagactgcaagaagtgtagtcaattaatagcattgcaagctaacagagaatttgaggaaaaagaacaaatagagaggggagggagaattcttcagcccacgagcaagcaagtagtatctaacccgagtaatgaggcgcaagagagccccatgatccagcctctaacaatatttctaaatctcgagcttcaggtcagccaacatttccttattcagcctcacctcctctttctggtaaatgcaaaacttgctttcacccatgccatcaacaagttcacgaatattggcaattaaggcctcagcctcggatcgtcgtgaaggaccctggccccatagagctcttgtgataatcccccgagtgttgatagcttgcggagaggttttgccgaggtgtggacaagcatccatccactcacaaaccggccgcgcaatttcctccgcttccttatatttcccagccttgacaaagtactccgctagcatatgaagagggacaacgttcgactcgtccggctttctctccactagcatgcggacagtttcctcggcctgcgggaggttcaattcattctcgagtgtgtatattccttgccatagcccataccaccgtttgtaatcgacatcatagagtgactgaggtggcgagattgccgtttcttcgtttgccagcttatttcgaagtagttgaaggagaagctgaagctttttttgctggtctgcggtattgtcggagtctattaccactgggtcgatggctagctgttccagttcggcatctgaaaagttgcccagaaaactccgggcagtgccgtagctgaaactgtcccagaagcgattgaccggtacaggtgcctcccatgaaaatgactcggccgcctcagcggtggcgatctcaccggttgagtaccgggaagatgaaacgactgtcatcctcgagatgaaagcaaagtgatgttaagagaagagtttgttcgaaggtatcggctgaaggtaaagatgactgaatcttggaaatggcgttttagcgttttattccagttatggggagcggtcagaggtgagggaagggcagcttactgtcagacaacaaagaaacgcatcgctagtatccctaaactggctaatgataaggagacaaaaatgtgaaattgtgtgctgatagacgcaatgagaaaaagattaagccaattctttctctctcgtattatttattttcatacatgacagagagagaaaaatggagatctgtagattgatttggcgccaaaagcttcatttgaaccaccctagaatgtggtgaatttatatggtgctaagcttgattttcatacatggcaagaggtcatcggacctggttattccgtgccggcataatgtacaggcataatgtacaattcggaggcaatgtacatagttaaccgtcaaacttcaggccaaatgttaggcattaaggccttaataatggtaacaaccctgggtagatgaaggaaagtgggaactaaagtattgaaattcataaggcacacatggactcttggagggccttgggcgtctaaccctactggtgctactgatgtcaagccttcgtagtacgttgtgcttcgacaaccttcgacaaccttcgatgcgcaataaccagtgccttacaacgccagcagaactagggtaccttgattccataatgaagccatgtgtaatggctgtactattcccatacctcccgaggtaactacaggcagcctaagcacaaaccacaacagtattcttttccacgattttttggaaacgaagatgatatgattattgcaaagacccgagaacaagcgttgattacatggaaagtaaaaagtccgaattttcaaaggcaccattttcccccacttcaagactcctcgagatctaaaaccctaaattaatagactaattaggcattactagtaataagtggagctaatggcagcatacttgcaagtgtgtagatgacatcgcagctagtgtgctgacgccaggctgacatgcacccatatctgcctaatatctatggcaaatgaattcatgcgtcttacacttgatagttcagccaggactggtctggctcagtggtaaatcgtagccatcttctctctcggaactctcaaatgcaattgtacaagctgcaattctcgaaataatttctcccttgaggcgaaccatggggctttctaccatttctccactcgctaggtatctttccctcgggggctcccccagagaattgcgacaatcaaattctcatgggggtggcgatgatcgttggataacactgcgaggcggtatagtctggcagagaccatccatgcgggttcatgctctggggccatgtggatcgtttcccacttgccgtacagccagcattggacccacgacgagaacgaccctcattgagccccagaccacagatggatcccctggggatctgaggtcaggattgctgtggcatcacgtaatatcgctaaccgtccatagatgggtgagtatatagatcttcggacgcctattccaagcttctctattcttaacgcacataaggggcaccctggcaaaaaggggggtcttgagtgtagaaggtcaacctctagaaattattgatccgcagtacaggaggttaccgtctgcatgattgtctcttctgtgactatctgttatttatgtttgctagatagattgttttaagtgagatgttcgaggtttgcaacgtttgcaaagagtcagctatatcaacaggctctcatttgcaacttgcttcttctttctttctttatcttcgttgtctactctctattgttgatcgatctggcgcctcaggggagtggtgctagtactgatataccatacttacaataccataccatgtttcgtgcatttgaagacaccggtctaactacttctgtgtatgcgtaatctaaaaccagacatccgtccatactcgactgttacagactgttttcttgcctctcaaccctcagcatgaacaccacaccggaacagatccttgacgtcgaagatgctctcgtttcagacaagaatccagcgcgcgatgaagatacacttgattttcaacgctgcgccagattgcacaactacctggtcgcatatgcctacatggcgcgtaatggaaccaatacgcctgatctcgacgccctagccagggagtcatggttcttcaaccagccgatcgagaatattgacgccattcgcgctcggcttgatccatcattaaactcatttcttgattcaatctatgatccgacgccgggattcttctactgggtgagcaggcttcgaatgagacttgccgacgagtctttccccctcgaagatagcgatttcgaggataaagagcggtttgtgatcatttacgacacaactcccgatctaggctcccattgtcttggtgttctctacgaccagctgaaccatcgtgcctcgttcccattgactatcgagaattcagaaagtatcgagcctgttgctgaacattgggatatgtggttccccctagagacgattcttacccaatggatctatatgctccgaatgggaaagatcacggccgatccacggaaagagagagacttatcccatgaagaagttaattcgcgacatcagattggattatggtgttggcacccatactgcgctgctcaaattgatagtacggttgctgcgatggaccgctacacggacgcgatcgaatcacggatgcagtcacttttgccaatatcccgagatacaccattttttaccgatacagacctcgatacggctttagtgccaaaggagtgctttattcgctcttttctgacccgagtgaggaccccacgtttcaagctaatcgcgccgggcctggaggttccgcacgataaagaagccttcacagcgcgtcagattttcaacgcggaaggccagggcagggatgtaccgtcattcctcctctttgcatctgcggatgataggcgcacgatcagtttcaacgaagaaatttatcgtctgttctttggatcgagaaatgatacaccattcaatgaaggtgatcctgttcccacaggattatatagtgcaacggtcaatcgattcgaatacgattctgaagagactggattccaccttttactcccattcacactacgaccgaatcttgccgacgaggacggagctaggcggagtgatggaactctagtgccatctggctcatccacgcagcttttccagcatggcgtttttcacccatttggcggagagcaccgggctcaaagattggagagactatttgatcgatggactgaattgatcgaaagtggcgtgtggacagtgggcgaaaatggcgttgagggagggatcgatatattccgggatgcagatcatggcgcctgggaggattactggattcccccatcctggtaacagtataaccgcacgaatcgacgagatagcgtccgcgtctgtgatttagtgtatggagaggcaaggggcatagtaaacagaagtaagaataaagtcatattgaagaatcaggtgtctggtggtttcctcccttgcaacctacgagttaatacgaaacaacaaaactaaacgcttgtccttagtgtgactttgagggaattgcaagcagtcattcccctacgctcttgaggctttgaaaccctgcttgcaagcatcggcatatatatgtcaagtccatcaccagataaccacacttgactcaaatgactctattcacatcttgatctaggtaatatacgaagtcaaatcggccggaagcctcttagtattcagttacatcgctttgttaacttatctaattcggaaacgtaatattaatcaagcgtgagccgtgaagggggacgagacggctctgctggggaatttcgcgcgggtatggaatatgactcttgtgcatggccatttttcgattggttgatggctttgaagcctcggtcgaagttcttgatgcaaataatggcgcataaaatggttgcagaagtcagcaccacagataccgatgcaaagaataacattatgtccttcccggctgtgacagccccgcagagaatgatgatgcggctgatgagatacacgagtaggccgaggtagcatgtcttgcaaaggttcagcggtagttcctcgtagaggcctgacagggtaggaagcaagggagctcacaatgataccaacaacgccaatggttcgctcgtgctggacaagccaaataccaagtagcatgacgatgaatgaggccggaatgaggaacattgtgagagtatactccggttccttaaagtggacatacaccaggttgtattggatgatgaagcccagcaggaagtaaaagaggagttttatcaggaccaagaagatctgtgctcatcttttgttagttcaaaggccagtgaagccgtgggtggtggaaatcacctcgtagaatagatagcgtattcgtgttttcaagctgccatgaacagacttgtagatgacccatgaatactccctatgcaaatagtatacaacgaagcacagaatcagggtgcaaaatccagtaattattgacactacaatctccgcaggctgaatctggggccagaggttgcgagtggtatccaccagagttggaaacccatagcgctggtcaaacagttgcgtgatagctcctctcatgtaaatgtactgcataatagagtacgcaaaactgcaggcatcgcagacgcagattgaaaagagaagaacattatttttgttatggatcgcatccagggcgaggatgaactcgtagaccgaggcgaatatgaaaacgcctagattgattgggaccatgtaggctactggaacctgagtgatggtaggagtaacccatagctgccattccacgagtatatagctaggtttctggttagggtggctcgggcgaagatagggactcaggagagcatacgtcttaagggcaatagtcaggatagcctgcgtgaataacacgatacacaaccaccattcatttcttatggttggtctatacatatcaggttgcttttcttctctctcgctggatcattgaatatggaaataaatattttattttgatcttcgactatttttttctctacctccacgtgatgtcttctatgcagtgagtgtcaaaccaatgggaatcattgcggcaaagtgttaaccttcttcggtgcgactgacgcagatctttcattagtacggagtagttgtggatctctcgtacggagcatttttatggtataatacctacaacatatccattgttcatgtatttaaggagatgccaaatccgaatccaaatacatatacagttggctccaatattttcaggataccagtctttttgaatattacccccttttagtgctctacgtacacaaacagtgggacctctgaaatattgggccaaatattgcccagatgcacgtatccacatatactacggagtaccgttggcccaatatttcagggatcccatagtttatgtggtttatgtgcggtgaaaagtacttcttacaaaccgttttcaatacatacaacatttatcatacgacagatggacatgtgagatataagttatacttaaaaggttcagttctgccaattgaaaccctgggcaacgtgaaatcttggaatatatatctgaaatatcacccgaatcctatatcattactaaagaatcgaaccaattcacttagattggaaactaaactataccatgtataaaaacggtagttccgggcaaagttgttgatttagtaccgcatggatctaaggaaaggaaaaaaaaaagaagtggacgggcagcgattcgaacgctggacttttcgcatgcaaagcgaacactctaccaactgagttacgcgcccatttgatgtaaatcctgaggaactttggttatacattgcaaaagcaaataagctaaatttggctttatgctgtgagtccgaagtatcttgacttgactgttctagttcgacggagtttgggtagaaaaatttcttctatctgagtcgttattaaataatgagcaggaatattctgcgcggtaaagctgtggcctagtagaataggcagtgagagggaatccgacatgatgaaggttgtacatcgaagatatcgaaagtgatatcatctatgattacatccatggatgtacttcgcccgattatgtagacgccgataacaaattaggatcggaagttctatacttaaaatgataacttttttttacgaagactatctcctctttctcccttttctttctataacttcttggatctatctcaacgctacccagataatgccgttcgctttgatccgccagccattcaaaaagggcttggtatttctagccacaaactggcgcctccacgttaacgtttcactatgacctatgattatgatgcactattatgatgtggacgaagaataacgcgcttggaaagaaatgctgttatgtccaaggaaaccaaatagaagccactttagagagttggccagaggatactgacgaaaatagctgaggtggcttggatggggaatctggtgattttctttacttttggttttgtcgaataacactaatatatgataacttgaaacttgaataattgcattccggctattgggttctgatcgaaactcgggggttgttgcgctctctctcgctttaaatgagtaagagtaggactgatgacttgaatatccatgtttgtttgcccagtttctgctatactgaacaatgaacaatctacaataatccgtattatattatcatcgagtgctaatatagatggagctatcctctcctgtctatagcccctaattcagtgtaaatagtgagttatcgttatccttactcttctgtcaggctaaattcaaggattaaggcctagaaaaagcagctggccgctctgcaaatggtaagaaagcaaacaagacaaatataaacatcacgatgatccatagacaattgtgtagttcgtatgctgtatgtccacgaaatgctcgacaggaataaagacacttcactacaatctatttcactacaatctaccttacagtttaccgtctcagacataaaatagaaagatgccagttcttattatagaactaataaaaatgaaaagataaaaaacatcacagagggtcgtatcccatttcccatttcccgtaagacttaaaaattagcaaaaacgcaagaaggggccgaattgatctaatcaacctcctccatggtgctctcgccggtagcctcggcgggagcagcaacctcggcagcaggagcagcctcgtcctcgtcgatgttcagaccaagggagacgagcttgtgaatgcgctcggcgaagctggcgggctcctcgatggtgaagccggagaccagcagggaggtctcgaagagcagctgggtgatggacttgacggtgcggtcgttctcgccatcggcgtcaaccttcttcttaagctccttgataatgggagacttgggggagatctcgaaagtcttcttggaagacatgtaagaggacatggaggtgtcgcgaagggcctgggccttcatgatacgctccatgttggcagaccaaccgaactggccagtacggatggcgcaaggggagccaaccagcttggaggagacaacaaccttctcgaccttgtcgccgagaacgttcttgagggccttggcaagaccctcgaactccttctcctcagcctcgcgctcggtcttctcctcctcggtctcctcgagctcgaagtccttagtgatgtcgacgagcttcttgccgtcgtactccttcagctgggtgaaggcgtactcatcaatggggtcaaccaggaacagaacctcgaagttcttctgcttgagggtgtccaagaagggagagttggcaacggccttgagggactcgccggtgatgtagtacatgttcttctggtgctcgggcatgcgagtgatgtagtccgcgagggaggtcatctcatcgccggacttggtggactggtagcgcagaagcttggccagaatggggcggttctgggcgtcctcgtggataccgagcttgatgttcttgctgaaggcggcgtagaacttgtcgaacatctcgcggtcctcggaaatctcgacgaacagctcaagggtcttcttaacgatgttcttacggatgaccttcataatcttgttctgctggagagtctcacgggacaggttgaggggaagatcctcggagtcaacgacaccccggatgaagctgagccactcggggataaggtctgtgcaatcgtcggtgatgaagacacggcgaacatagagtttgatgttgttcttggtcttcttggtctcgaacaggtcgaagggagcgcgcttgggaacgaagagaatagcgcggaactcaagctgaccctcaacggagaagtgcttgacagcgaggtggtcctcccagtcgttggagagggacttgtagaaggaggcgtactcctcattggtgatatcggcggggttgcgggtccagatgggcttggtcttgttaagctcctcctcctcgaccttggactccttgatggtcttggtcttcttcttctcctttttctcctcctcatcatcgacctcctcgaccttgggcttcttctcctcatcctcctccttggtctcctcggcatcctcatcggggacctcggtctcggtctccttaaggacgtgaaggtagatggggtaggagatgaactcggagtgcttgcggacaacctccttgatgcgggcctcgttgaggtagtccaactgctcatccttcaagtgaaggataatcttggaaccacggccgagttgctcgccctcggtgtcctccttaagggtgaaagtgccaccggcggcggactcccagatgtactgctcgtcatcgttgtgcttggacacaaaggtgacacggtcagcgaccaggtaggcagagtagaaaccgacaccgaactggccgatcatggagatatcagcaccggcggacagagcctccatgaactgcttggtgccggagcgggcaattgttccaaggttgttgatgagatcctatgagagatgaatatgagtattggtggtcagatagagatggggaagagtgttttaggtaactcctgaggacaaacttacagccttggtcataccaataccggtatcgcggatggtgagggtcttgttcaccaagtcggggatgatgtcgatgcgcagatccttgttggaatcgagcttagagggatcggagagagcctcgtagcggatcttgtcgagagcatcggaggcattggagatcaactcacgaaggaaaatttccttgttagagtagacagtgttaatgatcagcgagagcagctgagagatctcagcctggaactcgaaggtctcagacatgatggcggattgtgattctgaaagagaggttgagttagaaatgatgaattgataggaattgagcagatgcagagtctgatcgagcagtgggggttggggggtgaagttgggtgaagttgggaagcggtgacggtgggaagaacaggaaggggatttatatcttacaagaaagcaaaataattagaaagaagctctgggggggatagtaaccaaagcaaaggggagagatgaggaaaaagagtagaagaggcgggccagttccttttgtgtctccaaaaaaatctggtggagagtttctacggcgatccagcaacttccatgtcgttcaggcaacgcctgcagctttctcgatgtcattctagactcttctgcttttcacttttgtttctttgtttagactaattactctaacttgcccggtttggcagctctcaccttcctttttgtctatatttttagctgagctgtgagtgcatctgaactctagaaccttccccggatgactcgtcgactcatcgactcatctcaccattaggtaagcactggttagagcgctggaggtcctcggaagtcaactttggcagtacattcgatacatttgatatatagcaacttggagattcattattccctaatccatatttagtaggctcatcattccatgatacagttgtaaccccccccttagaatatcccatttacacatcaccggaccctcatagccaaagaaatcaaaagaagcaaaatacaagaaagaccggtatggcgcaccaccgtaagaccctggagtttgctatgctagttaaaaaaagatgcgatataacgttttgcaaaagaagagcaaggaacagatcatggcagaagacaatgaaagaaaggaatatggtgcaggaaaaaaagaggatcatgaatgtcgaagacgagactcgatcccagcaaaaaaaaataaaaataaaaaaaaggaggttaaaacacaagtgcccagagggaaggaaaatagacgcaacttttccagccagcccggaccaaccaaccgctaatatgcactgtgacgggagaaaaggggaggcaatagtcacgtaacacatgtcattaggaagagacggggcaaaagaaaaaagagaatcaaaatcggagtatacagatcccgagaagatcatccgccgggaggattgctcacaggaatgcaagagtcgtgacaccgacgggaaagaagaacgtagaggatcatcaaaatcacataaggtgtttaagcagcttggggctggctagggcgacctttggcggcaacgttgccaccacggccacgaggagtgaaaccgccgcggccttcacgctggaagccaccacggccctggctgccggcgcggtcaccgcgaccacgacccgcaccaccaccacggccggcagggaaagcgttgctaccgtaagcgttaccacgtgggcggcgctcctcgacgaggatctgctcgctgccaatctggtgggggttggcagcaacggcagcggtataaccggcaggctcgttgaattcaacaaaggcacagttcttggggcggctgacatcgaagtacttcagcttgccgaaacgggccagggtctgcttaagcaggctggcatcaaccttgtcgttgacgttcttgatataggcgaggacggtctcctcaacacggggctgcgacttcttgtggccatcgccggccgtctgccagccggcttcggtggaaggggcctccggggaacgggcaacctccgcaggggcgggggtggcagcagcgggctgagcggtaggggcagcgggagcagcgggagcagcagacttgggagcagtaggaacagcaggggtaacctgagcagcaggagcagcctgggcagccgaagccttggcggcagcagcggccttagctgcgaaagaggtagtcgcaatgctagcccaggtcttaggagcagcgggagcggttgaggtctccttctcaggaacctcccccttctcggcaataggagagggctcaggggtggcgggctcctcgtcgttcaggttttcagcctcgacggcaagaaccgcagctggagccgcctcctcagcggggacaccgttagtctgaggagcggcctccttgggctcctcaacctgctcgttggcctcgacctcctcaagcttctcatcgacgtctgagagagttacttcatcaatcacctggtgctcctcagcgggaacctcggcaacagcctcaggagcttcagcagtaggcgcagccggggtgggctgctcgggttcttcttctggctcttcggccatgtaccggaagatgtcgttaagcacatagtagccgttgggctgctcggcgaggacgaaagtctgcacgaacttgcgggacggctcggagttgttcgagatctcaccaatgactgagaccaggatgttgtcgaaagacgcctgagaatcgacattcaggacgcgcactttgcactcctggaacttcaaggagctaagcttctcgttgatggcctatgggagtggggtgcgtggttaggcgatattcacattgaggaatcgaatctaactcaccttagtaccaacggtgacgggaaccgactcagcctcagtgccgaagaccaactgagagcggcgagagtagaacaagtgaagcttgtcggggttgcggctcatggtggtgtagaactgctcgacgaagtaccagcccacctcatccttggagatctcgttcttctgctggtcggtgggagtgacggtagtcggggtggaggactgcgcaggctggaagctggcagcagtgttcatagtgacagatgcatggttgtaagattcagggtaaccgtgctgagcagggtagttaccattgataggaacctgagtcatatcggccatggcgttgaattgaggggttttatgttcggtttcgggtggaaaataagatcaaaagtaaccgagcgcggcgaaaatgaaggtcgagactacaacggccgaagtgcttcttttatgaagaagaaagcgatgaacgttctaaaaatggaattgtcgtgtttccctcgcttgactgcatgttcattaatttcaaggtcttgacttgggcatgggagatcgggactcacgatgcgaaataaacgcagcaccaatgcaagcaattgaagaggatagaaggaaatcacgtaaagaaccaaaaaaaagcgaggcgctttgagattgcggaaaagcgggaagtataggtgaagtgagaaagagttctcggttctgatggcgcggagagggagatgtggagggtttgagagaaagatgagaaagatcgagaaaatgtgggtctaggaagatgaacagtgaggcgtggagagtcaggtagaaaatggggaaacaaaaaacgagatggaatgaagctgtgggaatttgccttcgaagaaaagaacttccttcacttcgactccgtgcgggtttcgcgtggccttggcgggtggccaccgcccggcagaattcatagtacagctttagtgtacaaagatatattattagggatttctatccatatagatggggtcgaggaaagttttcatgatgactcaagatacgtgacagtcagacagggaaaataagagaaaacaaaatgccagatccgagagttgatactcaaatcatgcgcatctcatcaagtcaaaacgccacaaactgatccgaaaaaaaagaaagaggggtatgataggacatgaaagggtgactgtaaaaaagaaacagcaatcataagagccgcgtcgatagaggctcggatgttgggacgaggaaaaaaaaagaagcagagataaggaacaagacacaagcgaacgatcagagatggccaactatgcagcgtacacagcatatggcaagccttatgtctcctaatgtaccgtcaccatcagggctaatcagttcgcacctcagtcttctcggagagaggcttgcgcatgacagcgtcttggctagtcatcctccgacctagagcgcgctcgaccttagccccgagagcgagtttgttcaggttgtccgacttctcctccgtggggacaaatcgctgcttattgagaggcttgctctcgaggcgaccgaaaccgtcatggaggtgatagatgtcagcgattctggggtcgccgttgagggtagtgctgtcggaggcagccagcgaggggcttccactgacagtggagaatcgctttgagtttcggttctgcagcagattagacttgcggggttctcaataaataaagcaaaggccctacagcggacagaacatgtggaggggaagagaaggggattcctaccgattgggccatgatgggacgctcagagtcgagagagggttggcgggccatttctggggggaatgatacggttataaagaggaggatttgcgccgaaagaggggcgggatttcaaatggtaggtataggaaggcctgaaatggaatgcagactgcaggattgggctattagcgggtgtattattgcctagtggctgggcgatcttgaatttccaagggatacatactcaatccgggtactccgtcaaaggggatgtgttggaatcaggtgcagaagtaccaatgcagtgcaagagtagaaatagagtcacagaaaggagaagacggggtggagtcaaagtggttaagtggtggggaaagacaaaatgtgtggcggaaaaggggaagggattttatggaaagatcgacgtaatcgtaagatgtgcagtaaagagtctgcaatgaaactccaaggtggatatgtgattatacaaataagaaatgacctcgggattcaatctcccttctctgatgtcaattaaaagctttaccgggaatattttgccacgtgctggccacgcgagccgatcatttcggcgggtacggagtactcagtgatatacactttgtttctactccgtatgaagattagtattgtatattgtaatatgagggtatcaggataagatgagaatgaaagacttggattacttgcgagtttctatctcctataacatatgtcgtattggcagcaagaggcaacatcttggtctctatctctgtatatagtatgtaccattttacaaagacaaagagctggcaacacagagccccaacagagccccttttacaacaggtaaccataataccacatgcaaaacccaaaaaaatgatgaaacaagcccgtttaccctaacagtccaactatctagtcttggcaaactatgcagatcacgaagcaccaggatgctttgagagtctatagttcgagaagtcttgaaagaagtcttgaactactacattaacaagtaataaatgtcaaacctatcagaattgttacatgaagttgacgtgaaagcaacgaacacacttatactccatcacacaccgcacagattctgccggatttacttccaatttcaaggtgcaaagccatctctgtcgatcctcattcaattcaatcaacagcgtcccgcagaaatggccaagccaaaatcctttctcagggagacaaagtcgaagaagaagtctgcctcaaaacaggtatgcagtagcaatataccccgcacagaacagcttggtcatgatctcatacattttgatataggtacctgtgactgcagatgattttcttgcaggtgtgtgtctgaaccccaataagccaataatatcaatggtcaaaaattaactattctccagccggcgtcgagctagaagaagccggcgagaaatggcgggccggagatgcggccaagtctatgcgcttctttatgcgggccatcaccaactatgacgaaggactacaaaaacatcccggcacatttgatttagcttacaacaagtatgtaaacaagccattattttgaattttgcatttttcaaatctcatccatgattgaagagtattggtttgggtttacctttactaacacacgacctagagcacgagtccaatatgaaatcacccagcaccccaaattagcagcccagttgccagcaccacagggggagatcttgcagattgcactgcagtcacaccgggatgcgttggccctggagcaggacaatgctgacgtgttgttcaattcgggccaggtgctgaccagcttggcggagttaatatctaacctgaagcatcccgacgaggagcagcagatgcaggcaggcacctatttgcaagaggcaatcgagctgttccagcggtgtctaatggtacaggagatgaagtacacggaaatgcaagaggagatcgaaatgatggaatccggggatgtgccaccggagccggaggctgtaccaccggccgcgggacagtccaaagccgagtccgcaggtgaggagcaagaacagtgggcgatgattgtggagcccgtcacgaagaatacgctagtggacactgcggtggcgcagctggagactttgaccactctgtgcaacttgttgacttctaaccccagtgcgggcggtgttggttgggtgcaagagtactcgtcggagctggtgcagtcgcgactgcctgcttatgccgaaggttcggacagacagtacgaggcggccttggcgcgggccaagttcatctgtgccttgaacgatttgctctaccgaggcggacacaccgatatccaaacctaccagcaagaggtcggacaggtctttggtccagagctggatgtatcagcggaccctgatggactgtgtagcaaagcagatgcgctcacatcgttgaaccaggcactttcggatatccccccaccagaggatgacgagatgtttgagaacgcggtagcattgcgttggaagtcgctttcaaccgctttggacgcattaacggctgctaccaagctcccggatgccgacaacctgtccaagattcaccttggtcgcggagacgtcgagatgcacagatggcgtcttggtcgagcaccctggaaccacgccacggcgaagcagaacggagctatgctcctgcgcaacgcccagacgtactaccgcggagcaacagctctggctcgccgcgacggagcggccgaggaagaacgcgatggaacgtgtaaggaggcgattgctgcggcgattgaaggccagaatacgaaactcgagcagctcaagtcaacggacctccaacaggtgatagtcgtggcccaggatatggtggaagacggtatggtcgacggcagggaactgagtgccctgatttcatcatgaagcggacagagaaacaatttccgcaatatgctcacagacccgggtgggcttttgcctcctcgtccatctggatcgcatcctggcgaatgtgatgttgtctgctaaattgcgtggccgctgtagcagcaccctcaatatccgaaacaaccaatccaagatgcgacaatagccgctcaatttccagcctctgcgcctgcacagtctgcgcaagctccgcgttttccgcatgagtagcctcgagtctggcgttgagggtcgactgcgcttcttgcaaataaggcgtaaggtgcgccctgtacagatcttcagcgccgagtgtatgcgcgctgtgtagtaaataaaattagaagccagaacaaaaaaacaaaacaaacatagtccgaataaacggcaaaacgccccaatgcattcaacatacactgttctctcttgaccctcagcaattcccccctcctgctccctcctagctctcgcatccccaacaagccgatcaagctcatttaaatgcgacaccgcgtccctttccgcgacaatatcatcaaactcagccttcgcattcgcttccagcttcgcgttcagttgccgccagacaccctccaagctagcaggaacatggcgcgcaggtgtcggaaaacagcctgcaaagttcgcatatgaattggcacggagtgtacgcgctagagcctgctcgaagacttggtttagacgtgaggcgcgcgggcctggggattgggggattggagctggcgggggaggggatggcgacgccgcgggcggttggtgggaatttgattcgaccatggtgggtatctctgctttcggggtagagtcgaagagtgagaagtaatggagagcatgcgggtatggcgagggttggcgtgcagaaggccgtttctccaggaatttggatctggggtgttggactctgttcaacgcgacacgccggtcacgtgtttctatagattgaattggtggcttcgtacgttacagcgatagtatttggaaaactttaattttcatactctgtgaaatgctacatagtatgcgattatatcaattctataaagtagtgcagcagatggtatacttggaagaaaattcagctaccgaccaactcctagccctaacttaatggatctaggcccaaccaactccggcgtctgttctcctcattctcggctttcaccaaaagagcaggactcgggctttgagagtctttccgtagattgaaagattgtatattcgtcgccgaacgggatatgcgccacgagcatacgcgtctatagaggtcagaccaaagtaatttgaatgcgggccatgagatagagacgtatataaggctgttccaaaatccctggaggggaaggacaaagctagatgcatagttcagactaaaattaaagttgttaggacgagccagggaatagactctgtttatcgttgaggggacctgcagtgtcgaacaatcaacacaaagaaccgacagcagtttttagattataatgggcttcaattagacctacccatgtaacaagcaatgcaatgaagaacagcatagcgtattttgtatatgcccacgttgctgaactagcttctgtggacgtcgacctccgctgtgagtctgccccatccggccgcccagtcttgccaaaattctcctgctgaagagggctggaatcggtttttgagctggacttttgaagcgtgttggctgtactaccgccctcgatcgtgaccgagtatgctctgaacgcattagacggcaacccgctcgcgtcgccctccgacaaggaccggcgctctggagtgaaacaggcaatctccctggtaacttgaatgccagtcaacatagcaaagggagattctgggacaagatctgagtcaatgccgccgaggttccgaagctggcgccgtttctggtaaatcaccgtccctgctcgtaaatagatggcgaaggtcaatgagataatgagccagactggtccgtagaagatagcgatgcggaggaaggaccactgtacagagatccagcaccagagctgtcggtggatgattggattagcatagggtgatagaagggaggactttggggttctgctcacgagggcggagccatatattcggccccgagcttgggtctggatgaagaagtatgcgaaagctgggacgaatggaacaccgtaacagcagagcacatatttccattcgagccgacgtagttgctccgagtcgtatttgtggaagaatgttaggtaaacattgcatgccattgcaaaagtccatagtgcatcggcgggcatgaacctatgcatccttgcttattagtggccatctgctaatggtgttagttccgatttgatacgaaccattgaatcaaaaacccttgaaactggcacagggaactatcaaccccagaatgaatcccgtctgccgatatgatggtggctatattagccatcatgttaccccatgatgcatagaacaccaagcggttgatgggtttacggaatgtgggggaccaaataaaagtagcgactataacgaaagtgccaacaagggagacagtcgagcaaacacgctctgtagccgagatggctaatatttgttgttctgacagcgtcatggtacatggtctatgacctagtcgtcgcgaaaaggggagggcgtccagctcctgaaggttatagattatatccactgcagatatgaaccgagaagatccccgtggttcaacaaagccaagttagcttgtgacaaatcgaggatgcagatgaccgtagacttaccagcgggggacttattttcgggttggggttaacccttgaaatagaaggcaaacggttcgagtaaatatgcccagagcacaataccacctgcttattatccgcaacgggcaacaaaggaaaaaggcaaatgacaaatgaggcaagaccaggccaatcaggatatttctggttatttctttcggcttatagctaggaagatgaccttgtgccgagtcatgcaacaaaggacgcagtcccaacagtattaggttcgaacaactgccaagaaacggagtaagaaccaagcaggacatcttttaaatgttttcctcatttcaaataccgcatgggccagggctcaagccggtactcctagggaaggacatgcgaacgattccagtgtgatggtaccacaacgtgcaatctcccagaattcacggaatagataggagattggacaagggatgagtgctggtctgcatagaaaagcctcggaggcatagcccttggggttgcaccaatgattagagtcattgtttaggcgtgcagcctttgtccccgccgctattggggttcgacagtgcttgaaggggtgaagttacctgaatatgtcaagggttacagcggggacgatatttgaggggccttgtgagatcctagagtcagttcgcccatgtgtgacactagcacaactgtttccccccgacgttctcacagctcattagtcgttgtagaagaccagattgaaagacgggtgactgcatgtttgaaagatttttgcgaacaagcaagcataaaggaattcaaacgccaacggaatgcctgaaagggttgctcttaagtacttatggttgggtacttggaataaggcgcagtacagcagctatgagctcgctcgtcccgaaaatccttggccggtggacaaagaaccagttgcagcaacatgacaagatattcccgaggattgcagttccagcggggaaatttgaactaggcccaagtgcttgttgcacacatctcgctgtgtgtgttaataaatacagattggggtggatgacagaatgcatttctcgaggaatagctattgctatttagaagacgacaggcagaaggctgacaaaatctggagcgctgctccagaacattatcaagacaacagacagtgccccgaagtcaattcatctccaattaggccatatactcctcatctttgacaaaactggcccaaaatccgcaatatcaagttgtttttttttaaaaaaaaaagaaaaaaagagacgcaaaaatatccatcatcgggtataacgccgaattctcccatgtccaattgtccaatcgagctcgtcatctcgtcatgcgcaggctagaccgctaataagcgggctgcggggggatcatgcctccatatccagccatctgctgttgctggtgttgctgctgcaatttagcctggatctgaggcaaatcatggaaccacgggtgctgcagagcctcgttggcgctgatgcgcatctccggacggagttggagcatacggtttaacagatccatcccgatagcatccatttgagggatgatcagcgaaagatcctgcgtggcgtagatttggaaatcggacttgtattctggcaactgcgagatgccgggccatgtccgctcggatggtgtacccatcagacggaagatcttgaccaattgatcctcgttagttgtgccggggaaaagcggacggcccgtgtacatctctgccatgatgcagccagcggaccagatgtcaatgctggtgttgtaggtgcgacttccgaggaggacgtccggtgcgcggtaccacagagtgactacttcgttggagaaggtattgaccgggatgccgaatgcgcgggcaagtccaaagtcacccagcttgagctgacccttcttgttgattaggaggttctgtggcttcagatcgcggtggaggactcggttgtcatgacagaaagcgatgcccttgagtagttggtgcatgaaagatttgactgtggcaggatccagctgtccacgatcaccgcgagtgtccatatatctcttcaaatctctgtccataaactcaaaaacaagcataagtttgttttccgtgtggatgacatcgtatagcgagacaatactctcatgcttcagctccttcatgagtgagatctcacggattgcagtcgacggtgttccctcctccgaatccaagtggatttccttcagcgctaccatttcaccggtttggcgattgcgccctttaaagacctgtagtattctgcatcagcggtgagcgggggagaggcgatcatgctaggagccgggggagatgaggggagagagatcgagagagattgagacgtacggtagcatatgtgccttcaccgagctaaagataagacgaatactcgttagtgaagattccagacccgataatgaggggaaaggcataccttttccagctgctggaaggagctgggctgctgagtcttgtccattttttgtggaactttggaagccggtggccccgatggtttgggtttagaatgaaagagaaagtgaccaggggataccagatttgaggcgatctttaaagggtgggcaggatccctgaagtgctccatgctgagacgtgagggaggagccccgcgctgagtggcccgggacttgtcatagttggcccttttcttttggcctgagttggcaggcgcttattatttctacactgattttggtttctattgttgctataactggtacattgtttataatttgtttttagaatgtcctcttgttattttctaaatctataaattggctggaagttgggatacaacggtcggaaggactgactggcatggatggctacaccggacatgaggagtaggttcatgcccaagatttccaaaaagcagggcttcgttcctcacgccaccaacattgacaataccaatcggcatgcctcgtttgtgtgctcgttccactaggcgccacgccgagaaagtcgccaggctgctacctaggatgagtagccgcccagcatcgtcgatcgcttcttcagccgctgtcttcaccagtggatcgatattttcaccaaacatgatcactgccggtttcaaaatgccggcgtttgaagtcgccgataatgccccgtcactctctacctctacaatcgcctttgtgccatcgcgcagcgtgggaggattctccaagcatgtcggacatggaggataacggaaggtagaatatggcgcttcagcgaggtcaacgtcgccatccgggttgagcttcaagcctttccgccgttgctcttccggattatcggtatcgagcgcaccctctgcaaccatacgagccaaaaactccgcccaagctggattaagtttctccagcgacgcttgaaagtcggcgcggggaagttggttttgacagcttacgcagacgaccgatcgcaagtatccgtgtagttcgagggtagacagttcgggatgcgcgagggaatgaaacgagtcgacattctgcgttacaacggaactgatgtaccctttttcaccgagacctttaattgcccaatgagtcgaattcggctttgctttcagaagcccgggccagccaacgaagctgcgcgcccaataccgcttgcgtgactcatggtgggagatgaactcgtggtagtaaatcggacggtaagatttgtttcgccggtaggtaccttggtcgcctcgataatctgacagaccagacgcgacggagatacctgcaccagtcagcagtactgtctgggaatgtctccccacatcgacgccgcggagatttaaggacggtggcgcagtgaagaaagtgttgatagcatcaattgcccctgcaagtgtcgttgcagcccgaggtgttataatagcaggcggcaatggtcccgtgaaagggatccgaatagcaggcgtcgtcattgaagaccatcatatgttcaccgatgtcttggcggaacggggagtggaggttctccaacaatggcgtagttgcttggcggacacgaaggtattgtcaaagattaaattaaagtaatctgaaggataaataaggaatctgataggctccgggttggtagtccggtttgaggggatcaataggagtcatggagatggtcatggggagaaatgcaaacgtgcagattggattggaaacggaaaattccagggaatagccggatgacatgaacatcccacttacacctgggcaaactcatctttcaggcggattagatgtaacttgtacggaaatccctgtctttactacataaagacccctgaaaagaacactctgtccaatcctttgtgctcgcgtgccttcgacgcgatgccactgacgcagcccctatgcaggctcaggcttcgccctctccacttaaggatctccagtctcacatcacttactgcccagcggcgtatacttacatccactccttttttaaaagacgcttcttcctttatttttcactccagacctcgttccatcccacgagcggcaacacctctcgctatgacacaaactagggatcatggccatagccacggccccggtcaccaccacgacaatacctacctcacttccacaaacaaacgcgacgctggtgttcgcatcacacggattggtctcgttgctaatctgtgcatggccattggaaaattcgttggtggctatgtctttcactctcaatccctcatcgccgacgcataccacgcgctcaccgatcttgtctccgactttttgacgctgggaactgtcgcctggtctctgaagcccccgagcgaacgattccccaatggatatggaaaaatcgagagcatcggtgcgctaggagttagtgggctcctgctctgtggaggagtgttcatgggtctcaacgcgggacaggtcctactagctcatttctaccccgaggtggctgaaacagtagctcactccgggattttgggacatggtcattcgcacagtcatgggccaatcggtcctagcatccacgcagcgtggatcgcaggaggttcgattgtggtcaaggagtggctttaccgtgctagtaagtaaagcgatatagggtgtatgagtgtttgttatccatcaggtgactaactttattccagccatgaaggttgccaaagagcgcaagtcctccgtgcttgcatctaacgccgttcaccaccgcgtcgactccctaacgagtatcgtcgcccttgtcacaatcggaggaagctatgtcttccaagacgccacctggctggatccagttggcggggtcctgatctccttgatggtcatcaaagccggttggggcaacacatgtacctcccttttagagttggcggatactacggttgatgaggaagtccgacactccgtggaggatgctgcctccttggcattgaaggatatccaggatggacacgaggtgatcgttcgggatgtgcagggcctgaaatccggccaaaactacctaatggacattgagttggctgtgccgggggcctggcctattagtcggtcacaacacattgaagaggtcgttcgccacgccgttggatctggagttcgtggcgtgaagcgcatcaaggtccgctttattcctgcggaacatcaggacctcacgttctcggatgagtttgttgcacaagatgttagtggtgatccagagacactccaagatacccggaagcggcaatagggatgtaattctgcaatgatacccttggatgcgggatctatgtctataaatcgaatatagaacaagttcataatactaaacagagtacggagtacaaagtaagtatattgtactacagagtataaagtgtatagtatagtggggtaattctattctaccgagaatttagcagagcaacagctcaaaagagctatttacccggcaaaacctgctcgggctggacttgacattcctggagaatccatcaatctgacctaattggccctcggtgctcacttgccactttccaattgtccgctgtaccctgtggttatcgaagacataagaggatgcataaagtccaccgggaccggttatagtccttttacatcatcggtccatcccacctacacttcttttcccggactcaccccttgatcattgaattacattacatatcttcgcctaaatctggaagaatctcactttatctttcctgtcactctatcgcctggtattgtatctcttcggtcatggcgtccgatggccccctctacattggattcgatctctcaacgcagcaattgaaaggattagttgtcaactccgatcttaaagtggtctgcattgccaaattcgacttcgatgccgactcgcatgggttcccgatcaaaaaaggcgttctgaccaatgaagccgaacatgaggtgtttgccccggtcgctttgtggctgcaggcgttggacggtgtactagaaagtctgcgcaagcaggggctcgatttccgccgtgtgcaaggaattagtggtgcaggacagcagcacggaagtgtatactggggtcataatgcggagtcgcttctccgcaatctagattctagcaagtccctggagacacagctggaaggcgctttctcccacccatacagtcccaattggcaagactcgagcacccagaaagaatgtgatgagtttgatgcagctctcggcaagcccgaagatttggcgcaagccaccggaagcaaagcgcaccatgtaagagaagcatcacagtcttaagtataggcggggcaagcgtgctgacactgtcgtcagagattcacaggtcctcaaatcctccggttcacacggaaataccccgagatttatgagaagacctcgagaatctcattggtgtcatctttcttggcatcccttttcctcggccatgtcgccccattcgatatctccgacgtgtgcgggatgaacttgtggaacattcagaaaggggagtacgacgagcgcctgattcagctgtgctctggtgtttttggaggcgaggatctcaagaagaagctcggcgaggtaccggaagatggaggcctgcacctgggcccggtccatccatatttcgtggagcgtttcggctttagtcccgattgtacggttattccagcaactggtgataacccggcgaccatccttgcgctgccactactgccatcagatgcaatggtttcgctcggcacgtctactaccttcctcatgtccacccccagctacaaaccggatccggccacccacttcttcaaccaccctactacacctggcttgtacatgttcatgctgtgctataagaacggtggcctggcccgtgagcacgtccgggacgcaatcaatgaaagcctgaaggatacccctgcccaaccctgggccaactttgacaaggttgcgctgcagactcccccattgggccaacggagcccatcgggcctgatgaagatgggcctgttcttcccgcgacacgagattgtcccgaacatccgtaagggccaatggcgttttacatacgatgccaacaccggaattctacaagagacgaccgatggatggaactcaccgcaggacgaagcccgcgccatcgtcgagagccagtttctttcactgcgcttgcggtctcgagaccttacccagagcccaggaggtggaattccctcacagccacgccgagtttatctcgttggtggaggatctaagaataaggcaattgccaaaattgctggcgagattctcggcggtgttgagggtgtatactcgcttgatgtcagcgacaatgcctgcgccctgggtgccgcatacaaggctgtttggggtaccgagcgagagcccggccaaacatttgagagcctgatcgggcagcgatggaacgaggatgatttcattgagaaaattgcggatgggtatcaaaaggggttgtttgaacagtacggcctggccgtcgagggctttgcgcagatggaaaagcaggttttgcagcaagaggctgacaaggccaatgcagctgcaaattgaaactactatagacataaaaaaatgggagtataatttatttagcatcagtttagctattttcaagcctcatatagcaagggaaatagtacatatagtacgatgttttaacaacaaagctcccgcccaaaaacaacttcgtgcaagccccttgccctatttagaaaaacgccaagaacatcacatttgaatcaaaatctccatatctctactcgaaatacgttggacattggatttgaagacctgccactctcttggcaagcgaaggcggaacttggtgcacgggaccgattacgacatccagtttgaatgtctgcaggtgatatctcctccaccgaaaacaattttaaaacaacacacacctcccctacgttttgatttccctctctccttcccacaccttgaagggagactggaagatggaagaacaggtgagtctcccaattttgttgagcaccctcaaaaaccaaaaaaaattccaataccccaacaccgcccctcccccgccgtttcaaacaacctctccgatacctttccctcaactcaagacacaagatcattgacacatcctaggtagcaaatgcaattgagatcgcctggaatccatcctccgacccagccctaaagtcgcaagcttacgaataccttaaccaactccgctctgacccctccggatggcaggtttgcctctccctcttcaccaaaaccccacaacagcccgaagtcgtacggcatgtcagtctggagattgtcaatagtgctgcccaggtcggtttgatcgatccggcctcgctcggtgtcgttcgagatagtgtgctagcctacattcgccaggtctacggcccggaggccactgccacccccgatcctccttacatccagaataaaattgcacagaccgttactttcctcttctcctccctctatgcgaacggctgggagacttgtattgacgatctactgagcctgaccaacaaatccgcgggccgggataaccaaatcggcgttgttttttacctgcgtgtgctgagttcaattcacgaggagattggcgatgtgctggtttctagatcccgcggggaacaggataaggcgaatgcgctgaaggacctgatccgtgagcgggacatgcagaaaattgccaactcctggcaggagattttggcggtctggcgggaaggtgatgatgtgattgtcgagatgtgcttgaaggcggttggtagttgggttagctggatcgatattggtcttgtcgtgaaccagaccatgttagacctgctgttccagcagcttggacgggccgagaaacaggagcttcgggagggagaacagcgggtgcgtgatgcggccgtggatgtcttcaccgaaatcattggcaagaagatgaaaccttcagacaaaattgagatgatcgctttcttgaacctcgactccatcatcacgcagctgtctaacagctctccactacgggagagccgattcacatccaagtacgatactgatttggcggagacggttgccaagcttgtcaacaacacagtcgtggatattgtgcgggtattggataatgatgctggtcccgtcaaggagcaggcagaaaaccttctgcaggtcttcctgcctcacattctgcgattcttctcagacgagtacgacgaagtctgttcgactgttattccttgcgtcaacgatatgctcacctacgtccggaaactcgcaaaggcgaacccatccttcgaacagcgaaacaagtccatcctgcttccgattttgaaggcaatcattgcaaaaatgcggtacgacgagacctcaaactggggcgaggaggacgagcagacagatgaggcagagttccaagacctgcgcaaaagactaggtgtcttgcagcaaatcatcgcatcggctgatgagcagcttttcatcgatgcgatctcagaggtggtaggaacaactttccaaaaactgcgggcatccggtgggcagctcgattggcgtgacctagatctcgctttgcacgagatgttcctgtttggcgatctggccgtcagaggtggcagtctctacctgaagggcgcgcctactaacatggctgcgaaccgtctcatcgagatgatgcttgcgatggtagagtccgatatccgatcattcacccacccggcgacccaacttcaatacatggagatatgtgttcgttatagctcgttcttcactcaccatactcatctcatccccggagttctggagagcttcctccagcttgtgcaccaccctgttcgaaaagtcaagactcgttcatggtatctcttccagcggttagctagacagctgcgcagccaaattggcaacgtagcacaaactgttgtggaggcattgagtgacttgttggttatccaggccgaggtgccttcagagggcgatgacgctgatgagatgtcttccgaggaccacgagggctccgcggacgccgtgttcaacagtcagctgtaccttttcgagtcagttggaataatttcctcgaccccaagtgttagcgcagataagcaggttctctacgcccagtcggtaatgaaccctgtctttaacgatatggaacgtaacctcgaagcggccaaggccaatgacgaacgtgcattgctgcagattcaccacgatatcatggccctaggaaccctcgcccgtggttactcggattggcagccgggcaccagctcacccgcagctctgcccgtgcctgaggtctcggcggctttcgcccaggttgctgaagcgaccttggttgcacttgagtctctcagttcttcattcaatatccgaactgctgctcgctttgcgttctcgcggctcattggtgttctgggcgcgcagattctccctcaactgccccgatggatcgatggactcttgactcagacttcgtcacgagacgagatggccctgttcctccgccttttagatcaggtcatctttggattcaagggtgagatatatagtatcctcgacacgctcctgactcccttcttgcagagagtcttctctggcattgccgatccgacaaccggcactgatgacgagatccaacttgccgagttgaagcgagagtacctgaacttcttgctggctgtactaaacaatgatttgggaactgtaatcattagcgaaaggaaccagcccatcttcgagaccgtcatcaccaccatcgaacacttcgctaaagatatcgacgacttcacaaccgccaagatggcgttctctgtcttgggccgtatggcaagctgctggggtggacctgatattgcccctgcccctgccaatggcaccgcacctgcccaagccgcactccccggctttggtggattcatgatcacccggttctcgcctttgtgttgggcactgcccacgacaccatccttcaactccaaagatgcacaagctaagcaggtccttgccgaggccggcgctttgcaacgcactatctactccaagacaggcatggaatatgcggaatacttgcgcagccaggaattgcccggcatgggcatgggggccgacctcatcgaagagttcctgaccgctatgaaccagctggacgtgaaagggttccggcaattcttcccggtatgtgctaatgccttaatacttccaacgctttcgatctacgtggcatccaactaattcatatgcaattgccaacagtcattcatccaacgattgagcgcatgaagtttcctttcctcctctctatctgctttctagattcccccatccattttccatatttacgttctgacgcgacgaggtgacgtctgtcctcatgtcgccctgtgacttcaatcttctataccatctacatcatcccacccaagcatcccgatcccgataccttacttgcccaacttgaaccccaagaatagtgctggatcaaactctcgggggcaaatcagaaagaacaaaagaatttacctgattttcaaaagttccgagtatatagcttgcttcttgcttttcattgatctcttttgctcatggtgcattcgcattgtggtgttcatttgtatcccccgacaaccacttcacggcgtatcctttttatctgccccccctctctcttgtcggctttataggataagaccgaaaggggcttattttttctcgtgtcttgtgttgaatcactttcaactttaatggtgtgaactggagtaggtagatcatgaaatgaagtggtagagttgcctcaataagctcaacagagtattgactacaagaagcttagaatggattgctacgtacaatatagtaacctgatctgtttccaaccttggagaagacaagtcaccattcggtcatctccactacaatcctgctactccccacgatgtaacccttctttcggttctacctactagcctggaggccaaaaagtatgatatgctcagaaaatgtgctgcctattaagaaatgtaactctaggataagccacaatatgaacggatggcgatctagggccagtctcttgttatacaaggcagacatatctaggaggctagtagctctatgctgtatctgagatgcaggatctgagggattctccgctaaacgtcaatcaccttccgatttatgatgtactccacactccgtacaagcatctgcattgggagcagaatttgattctggactggcttttgtattagtatagtgcacatgactatatttgtggtttaccacatcaaaacttgaatacctgagactaaagaagtgcaggtggagtcggcattaatcttgcatccttgtatgaagaattctttagggttagcgattggacaaccccaattgtttggtataattagagattgactaaagttctcgacagatgggacgatcgaagagatagatttgtaaatctagagctacctataacgtaatatagagtagaaaatcgcttgagaagttgcatagttatccattccatgcatgccctatcccaagcccaatatctcatgcagctagcaaaaatccctcaaaaacagcttgtaagttggtaaactaatttatatccctgtctagacccactgggggccatttttctcatctgttattcgcctctccttcatctcgagagatctaaacctccaaaccatcagtgtaaaaacgacagacttccggtttcccctccagaaatatttaagcaatgcctactttggttaatcgcatattcgaaatagctcgcttctgttgcctatctggtctcattattttcaacggcctctactgctatgttgtttccgaagagtgtgctgatcacggcactttgctatctttcaacttcatcgctggcctctaccttgccttcatctatccaagggcagccagttccagacaagtggttccaaatctcgctcaatgagagcacttctgggaataccagccccagtacaaggaacatcgacaatgctcttgtggaacgaactcccatccaggtctgcgagcgtatcattaccgcgaccgctgcctgcactgtgatcgcaggttatgtgatttcatttgcaaatcgatgggagccacaatcaaggagctctccaatcagggcaactgcaatctcatgcgtggcagctatcagaacctcagatggacataccaatcttccggccgaaactgcgatactacagcacagcaggcaaccatttctggcgccatcaagaaatacatgaccaacgtggaacacaacaaaatctgcggcacttgcctttcttccttatgtttcttccatagaacttctgtcatgtttgagctatggaaaatgctgtgatgcttaggcctcatgtgatagtattccctgcaagcttcccgatatttgtctctagttatacatccctggttatatattgaaaatccggctgcacattctaagccttttcccgctttgtttcgccatctagttatgaaaccgagaaaggagagaaaatgccaagagacatcaaagaccaccaaaaagacacgataaagccacttatgccgccgactacccttgtagtttccacaagatagaaggtttcttcctctttcaagtgccctatagctatcgggaacactccgtacaatcactcgtgttcttgggtgtatgtaccttattaatcattgggataaaaatagcatcagttatcgtgctagtggttgtgtcaaaaactgtctaaatcttctttagccttccaacattcacatccatcaaagtcttcgaatacattgacgtttcatggctcagaattgcttgaccggcgcttgcctctgcaagaacatagcataccgtattacgttgcccgcgtcagaatcaccccctaaggtatagtttatctccaacttgcccaatcagcaaatcccattcgcttactgacaatctcgccaggtgatcatctgtcactacaccaattgcaaacgctatacgggctccagcttctctgccaatatcatcgtgccacaatctagtttgcagcacatcaaggggtcacccaagttgtattcggatcgtagcaacaaggacacgcaggtattgcgcgagctctgccctgattgcggtacgccattcacatcacgatcaagcgatgatcaagaagtcattgcggtgaagtcgaggacactcgatgaagaacaccgacttaactgtgcgaagttggcaatggaaatctactaccatcgaaaggataaatgggtggacgagatccctcctgcttctgccctaacagcgagttcaccagcgaagtcagttcctgcatccaagcctagtgtgcctccaagtccgatccaatccgccctctcctacttcaccggctatcagcgagcttctgagggttggctcgagaaagtcaatcgcgccttccttatatcgaccaggtcgcactttccattgtaagtaagcccaggtaaataaaagtagcatcgaacactcatgtaaactcttcttctttttgatctccgtcagaatttatctcaatctttacgacatgtcttttcccagaatttataatttctttgcgcagaaatgtgtgccggtgaccggcaatctctcagcgattgtcggtagtgccatcgccgttgcaacgtggagggctaagctcgcagaagaccgagctaaagccaaagagacagacaatccccctccacacggagtgaagtaatcttgctcgtcaagattaccgggcgcttgctggatgggcaactccagcgtgtgcttgctattgaagacggttgcagtgtccattggacctgtctccgacggatatagctcctccctcggcttaatgacataggggctggattctagagctctgtctctacagactgacagtgggtttgttcacgcagctccactggcagtctggatcgagtgcttgcacatacttcgttgtcctgcgccccttttttttatatatatctatagcccctcttgctgaccgagggtgcatttattaaagaaaacaaaaaaaggtccacgcggttgggtggttaggttgggcctgggacaatcttgctttcattttcgctgtgagtacttccaaatggatgccctgttgctgctgactgacagtgggttggttgagcattgctcgcatttcttgtgacagtctgggacacgaaggtggaagaacccgaagtgtcggtgtttcactgggcaggtggtctcggtcccgtaagtcataacggtggtagtggcaccctcaggagtggtgggtgtggagttggcgccaacgcttgatcagacggcactggtgacagcgggccccataggagcagttgtggcagcgaccagagggagccggggtgcttccagcagcgatagagctgaaaatgtttgaagtggaggtcagggtaacagttgaaaccgtgctggatgtacgtcggatcggtactgtgagtgctgttggagtagggaaggcactataggtaactataacttcgaagttttctacggcaaaggaaataaaactctagttagcatgtcaattgactgatgatgtgagcatttttgttatggtacacatttgggacctaccagctccaaaggtgactggtcccgagaaaaaagaaagaaaaaacacgcctgcatcaagggaaataaggaacgaaaaaggaacagtatcaaccccggtttaccaggcctcggtgtcgaagttctcaacgccgaagtatgaggcaacaactgtacggtcagagaacttgcgacccgccagcgctttgagagcggtggtggcggattcagcggtatcgtacttaatgaagattttaccagcgccgtgtccacggcgggggggcttcatcccccgaaacttttccnnnnnnnnnnnnnnnnnnnnnnnnnnnnnnnnnnnnnnnnnnnnnnnnnnnnnnnnnnnnnnnnnnnnnnnnnnnnnnnnnnnnnnnnnnnnnnnnnnnnnnnnnnnnnnnnnnnnnnnnnnnnnnnnnnnnnnnnnnnnnnnnnnnnnnnnnnnnnnnnnnnnnnnnnnnnnnnnnnnnnnnnnnnnnnnnnnnnnnnnnnnnnnnnnnnnnnnnnnnnnnnnnnnnnnnnnnnnnnnnnnnnnnnnnnnnnnnnnnnnnnnnnnnnnnnnnnnnnnnnnnnnnnnnnnnnnnnnnnnnnnnnnnnnnnnnnnnnnnnnnnnnnnnnnnnnnnnnnnnnnnnnnnnnnnnnnnnnnnnnnnnnnnnnnnnnnaatgaagattttaccagcgccgtgtccacggcgggggatcttcatcccgagaatctttccgaacttggcgcattcctcgctcacatcctccatgatttcttcgtaatcttcgtcattgaggagctcgtcaagcgtgaccatgttgagaagctgcaggacctgggtggtctctagatcctgggaggtcgtcttggcgaacatctgcatggcattcacgcccatgtcgaggccagaggcttgtgtggttccaacgctggcgagagcaaacttaaggtggtgatcgactagttccatgccgttcaaaccttcaacggcaagcgcagtgttgttcgggtcgacgtattcataaaaggcaattccctggaaaagttagaaagaatttgacggtagggaaatactcaacttacccgagactcctctgtagcagcatccttgaccaagacaaatgacttaaggtcgccgaatgacttgagcaacatgataatagcttcctcgttgatgtaggttggaatattagagatgcagatcttgttgggtgagtcaggcacctcgctcagaacgacgtccggctgtactggctgcgatgcgctcccgtcgggaacaatgtagtcctttggccgtcgcacttcaagtcccttgtctccactctccgccatggtaattccatcgaaagccaatgcgactgtggcgtcatttggatccttgaactccaggagcgcgaatgttttatcttcagaaacttgggcagagatgcagggatcgacattgtgaataacattgagtccattcaattgaagattgaagaaggtaataacggcatcgcccgagacaccggacgggatgttgtaaacgaaaagacgctttgattgacgagagttagaaggcttgagggcagcattgtcgctatcgccagtgggagggttcaggaagtccttcatgcggctggggtccatcggctgctgacgaggagctccgggaagagggaacatccctgttgatgttagacggttccactagctcataagctttaaacacatacctgagatctttgcctgttcagccgtaacattctcataaccaggaggcttcatgtcccattgagtcaaacgacgtttacgggtcaacaccgagggcacatctgtcaaatcgggggtaggctccttgcgccgcgggggcgtggcgcttcgcttgcggtctcttctctcacggtctccacggtcaccacggtcaccgccaccacgtccaccgcgtcggtcgtcaaacaagtcgcgacggggtctttcgtcaaagtcacgtcgacgaccaccaccgcgatctccaccaccacggtcaccacccccacgatcaccaccaccacggtcaccacccccacgctcagcgcggtcacctcgctcggcacggtcgccacggtcccactctcgatcatcacggcggccagagtagcggtcttcgcgctcacgggcacggtagtcacggctggttgagtacgagttcacttcgcgctcccgacgagatccatgatgaggcgaacgcgaacggcgtcgttcaccgcgatcactcctatcgccccgttcagctccacgctcggttcctcgttcggcaccacgctcagcacctcggtcggcaggtcgctcagctccgcgttcgggtctgtcaccccggtctcgatcacgccgctcgtcgcgctagaattggggttaatcgccgcggttgcgaccaaagattggctgatacttacgaagtagtcgcgggaacgtccagtctcttggggatattagcagttataccagaagttaatgtaaggatacttacctctggatgagtaggtgtcaccgttcatgttgaggttggttgaggaaataaatgaacctgtcgccagtgaaggggaaaactcatgacccagagctgcaggcggtgatggcctcaccgcccgtgtgtcgattcggattccggcagaaaatacaaacatggagacagcgactccgccgtctcgaatcagtaatttggatttcaaacatgtctctaggtgttttgtcagaatggcagaagctgcctttgagcttgagtgagctttgcatcaatactacgctcagatgcggccagtcttttaggtttgtcagccaagtttccgggtccggggattgtagatcaagcgactgaccctttttagatggcggaactttccagagagtcaggaatggcgatgcgttctctatggccatcttctgtcgctgaagcaagactcaaacttcttgtactatagatctgtgcaacctccttcccatgcattcaccgacaatgatcatctcatccgcattatcaaacattacttcaacctaacgccaaatttgactgaactctactctcaatggtcatcacaagaccccaatttcaagaagaaggctgcgcaattcaccgggatcaggatccttcgacaagatgcatgggaagcattggtatcatttatctgcagcagcaacaataatattgcacggatctcacaaatggtggagaagttatgcatacattatggaaagcccgtggccacaattgaagggcgtgcatatcatgattttcctcccccaggcgcattgactggcaaggatgtggaaagcaatctgcgcaatttaggatttggataccgggctaaatacatataccaaactgcggttatggtatccaaccgagagcagggctggctagatagcttgagcaaccccgagtgtccagcatttggcgtggatcctaaaccaagcggcgaaatgaaaccagaagggcgagagggatatcgtgaagctcatgaaaagcttcttgagctacagggagttgggccaaaagtgtcagactgtgtcagtttgatgggattaggctggggagagtccgtgccggttgatactcatggtgagttcttttgataatgtttctgatttatctctaatcctttacgatagtgtggcaaatcgcacagcgagattaccgttttggaaaaagctccaataagaacttgaacaagacgacttatgatgctgttgccaatcatttccgcaagctttggggtaaggaagctggatgggcccatagtgtgcttttcactgcggacctgcggacctttgcagacaaacttgctgcaactaagaaagttgaggtgaaggtgaaagacgaagagtctgatgtcaaggttgagacaaaagtgacaactgctctctctttgaaggtttctaaggaggaaaacgtcgatgtgaaagtcaaggtcgaagacatagatgatgccaagaagcccagggacaagaagagaaaggagactgagaacattattcctgttgttcaaacaacagagacacggagaatgtccaagagactaaagcgttgaagccactaaagacaagcaaaggactattcttgactactacttttaccgcagaaaatatctatacatcttaataatgaatatgccagacgcaaaaatgtacgacgagacacgagtctagtgcaattaacatgggtatttgtattcaataatcttagctatatcaatgatcaatgcctacaaccgtagttagtataacggtcgaacaactcttaacacaagtcttgaagttggaagaggtagatcagaagtccaggtagatcatcgagctagcatccgaaaacactagctctgacataagaggtaccagaaaataaagtataacaaatgcgttgtatcatcatgtgggaatattggagattgagcaagaagaggttgaactgacctgatataagagtggcgagaggcgtgtcgagtgtatatcgtacagctcgcactcaagttgaaccagaaaccattaattccagtcgactcaagtgcagaactgggtttgtcggttgttggtgttcgaacaaaatcggaagagaaatgaagtgaggttttgtcgaagaaaagaaataagcgaagtctatcacgtgaccccacacaggccccatctttcccgcccactctcactctcacacttctcgattttcgatctttcatccacgccgacaaccgaccagatttcctccgccggacacatcaccaatccaaaatgggtcgtcttcacagcaagggcaagggcattgcctcctccgccatcccctactcccgcacccccccggcgtggctcaagaccacccccgaccaggttgtcgaccacatctgcaagctggctaagaagggtgccaccccttcccagatcggtgttgtcctccgtgactcccacggcattgcccaggtcaagattgttactggtatgaaaactcagaaaaacgcgactctaggaattggaggattgaagatttctaacattttcgcgcaggtaacaagatcctccgtatcttgaagtccagcggtacgactccctccgcccgcatatttacatctgtcgggtgaagagagcgaacaatttgtgtggataaactttctggttcggtgaaagaacccgttggttttgaagcgcaaaatgctcgtctctctccccgagactggtcgcagaaatgcaccagcaattaagcctctgcttggtcaagaacatctagactgacagagagattttggaatacaggcctcgctcccgaactccccgaggacctttacttcctgatcaagaaggtaaaaagaattactccttccccccccccccccccccccctctnnnnnnnnnnnnnnnnnnnnnnnnnnnnnnnnnnnnnnnnnnnnnnnnnnnnnnnnnnnnnnnnnnnnnnnnnnnnnnnnnnnnnnnnnnnnnnnnnnnnnnnnnnnnnnnnnnnnnnnnnnnnnnnnnnnnnnnnnnnnnnnnnnnnnnnnnnnnnnnnnnnnnnnnnnnnnnnnnnnnnnnnnnnnnnnnnnnnnnnnnnnnnnnnnnnnnnnnnnnnnnnnnnnnnnnnnnnnnnnnnnnnnnnnnnnnnnnnnnnnnnnnnnnnnnnnnnnnnnnnnnnnnnnnnnnnnnnnnnnnnnnnnnnnnnnnnnnnnnnnnnnnnnnnnnnnnnnnnnnnnnnnnnnnnnnnnnnnnnnnaaaaaggaaaaaaaaatactccccccccccccccccccctccttttatccatgtagattatgctaaccttgattatctaggccgtcgctgtccgcaagcaccttgaccgtaaccgcaaggacaaggactccaagttccgcctgattttgatcgagtcccgcatccaccgtctgtctcgttactacaagaccgtcggtgtcctgccccccacctggcgctacgagagcgccactgcctccacccttgtcgcataagcgcattttgggaggatgagtggttgacggaggaaacccatcggatcgtcgtgatagtcatatctggagggtctatcttctgctaggtacaacaaaaaagattacgattatttgataccctgttcatgaatgctctagactcctttgataattgtaggttcggctagtaggttagatctaggtaattttgttgcataagtgatcactcgtccgccaacacaaggtagttcagtataacatactagtatctactatttgacccatgtggttatacacattgtatgactctaagtagacacatatccaagtgtatatataggtgttctcacaactcacactcagcagctctaacctccctcgctacagcattgcaaagctcaactttaacaccagctcctaacaagatatggatccaaaggcgctgagtatcactcagccgatcattctccgacttaacctcagcgaacatcaccgtcctcgtctcatgattccagaggaacaagtccgggattcccccaccgcgctgctggtactcctgcgccataaccttgcagatagtagcaagtgcctctccccggaaacattgcacgatctcaactaagtcatctagatcaaaagaccagtcaagcccaacagcgcagggctgcgcctccgcctcacgagcatagacctcacggacgatccgctccgcatccccattcgtgatctcgacaagtcggtgattgatctccgatgcacgagacgggtagaagacatcagtgtggagatcgagcggacacgtctggaacgcagtttggaaaacattgggcacgtatgtaaacaggatatcgtaaaagagatagccgaactgtgatcaagatcagattaaaagctcaatcttccggatattccagactcaccagcgttcgcacaatccccccttcggagtgataccccttccatccatgatcgcggtaccaactcagacacatattctccaccctgcactcgccgccctccctctcatcaatccaaacagttgctttcccctttcgcggagcatcacccgtatcaatacggataccctcaatcgtgcgctcagccggcttgcctagcatgacatgtccgaaatcatgctgctcgcgctttaccacccgtagcgccttttccagcttcgtgatccgcttctgtaggtcgtaatgaaatatcagatggcacagcgggtcttctagtccggcctcgcacgtccgcagcgcaagtctcttccaatgcttgcgctggagttcttcgctgcgcccatctgcaggcgcaagcgcccacatgtagtgttcttccagcagtgccttgcgctggtaccaagcgccgcgccgcgccgcgtggaagagacgttgggcgagaagttcctctagcaactcgtgctcgcgtctatgctccttgaaccgcccgagcgcgtggagactcttgtggatgattcttgtgagcacccatgctggcgagaaccggcgtagataagcgccctcgccgctttcgtacatgttgtcttctttcttttgttcttgctcgacgagctctttccatcggggataggactggtaagcaaggtcgatgatttgttggagtgaggcggtcgtgactgggccgttgaattcgaggatgttgtcgatggcgaattgggtttgtatcgctgattcgaattccaatagcgtttctctggacgagaagatggagtttgagcggcagacaatatattcggggaaatttcttttgctcattttggctaggataattgttgtgagggacttttcggtccattcggtggaacgatagaatactaggtgcactcgctcgaagagagtgcgaggcactggcgagatcctgatacatccacccgtgtagtccaatatcttttgggtgaaatggctgtttctgttatttgcgtcttgaagtcctttttgcgtctggctcgtttcgcagagagccgccagcagctctttcttgctcttgccctgaaccttggcctcctttgcaaaggccttgagttcttgcagcaatagaagtgatgaagcctcttccagcgttgtgatcgcttctatgccttctgcaaatctgaacgtatctccgagttctgaaccaggcaggctgcgatcccgctgtaggtcctcagcaacagggagcaagtccgagatatcggagcagtagttcaaccggttgatacggtgccatgcagacgtcttgcggaggaacagtcgaacatacctagtaaagcattaatctcaactataggttatcacattctacaggaaaacatacagatactgggattcgtaggacagcccccgccactgcgcaaagatttccatttcggcctcgtcaaaaagatgcgattcctcatccagcacagtttccagtgcaaggttgaaggcatccacatagatggagcttttgcccttctgccagacgccatctcgtagcctcacatgtaatcccgtcttggtgtcgttctgtagggcctcgtactcctcgattgcgtccttgtcggtcttgatcgcaggaagggaagtttcgagttctgtttggctgctaggaacaatccctaaatcgtccgctgcgggggtctcccccgccgtggccgaaggactcggactcggtggtttaatatctgcgtctgtactagaatactccgtttcaacagttcgccgacgtttcgcgggacgctgcgtctcccagaagttcagcaaggacataatatctcgtttccatggatgcaatcagtcccaatgactcgagtctccaagtataagcagacacgaacgacgtgtctcgcgagcaggtttcgaacacgtgatcacgtgatccatatagctccatcagattgtttgtcctgtttgcgtatgacatagacacaagaggcacagccaaaagcataagaaaggtaaccaaacaaagacgatctgaaacgagagaagaaaaaatgccctctgaaatcattcgaaaagtccccaagtgcaacctctagatataaaaatggccttaccagtaagcagctctccctcctacaacggatcgatacctccgagctccacagcttccgctccgcgaacactcgcattccacttcttcccaaaatatacacctcccaggtactcaattaacctgtgcagcctcccaccctcgcgatctcagatccaccggcttcctcggctcctacagtcaccacagctcaacccccatccacaatgggcgaaacaaacggcactggctccaacacgccgcttggcgatttgggctatgtctctgcgggtcagattcgccccggtggcgcgcctgctcgcgtctatctcaatgagaaggtcgtgccgtatctgcttgatgggatgaagtctgttgcacgcgaacagtgagtggagtattgtgcctggctagcttttttatacttgtctactagatggatttactgatctccttgtctttcgcttttctgcactaggcctgccaatcctctccgtgtgctcggcgagttcttgcttcagaagagcaatgaggtggagggggagactaagaaggagtcggagtagaggggagaggggttgggatttctttgggcgtttcatggtgcttgatcagctattctgatattgtttttatttggttttgaaagcttgtgagtggactttaatgtacactacgatgttcaccacttgataccccggtcgatgtctatatctgtcctgttagtaggaaggatcaatagcagaaaacaagatagagagaatgatatctcgaaaagcgaggtggtgattatctggtataatagattgaggatctacgtacctatgaaagtacggggtagagtattatcaaataggcattttgcaaaaatagagcgttttggcgcatgaattctacatcttgcagtcctttgatctaacgctaaggagggcgaagaacatctaaaaacatatctagaaggtattataatgtgataccatcccaagtaggtcagactactgactactcaacttctgcgtcgtcgaagacacagaccacatgattgtacttctaaacggatatatagacaccggggtacagcttatgggaccatcgaatcatgagagccaaaatatgtattcaagtttggaagcttcatagagattcctaaatggagtaagtacaaggttgttctatatcccgaccaaatattcggggaagaacaaaatattcgaaaatgaaagcttcgaataaagcctagataggtcagcttgcaaaacacatctcacctttaatggcattccaaatcgattaatgcctggagtttaaaggttgagactacaagcgcaaagtcgacggctttgaattgggcgaatggttgatcattcagttgtttagagaagtcgaatacaatcgggccgttactggagatggtgtataggtgaagttgtagctgtagctgtgtgacgaatttgctgaccctgagataaccgaattacagcgataattttctgtccctttgccgctagaagtttttttccccgaagttgcgtcgcaaacagacatgaaagagatacctcatcaagcgaccgaagtgtgcatcgatgaagttgccgagtcgtggcgctccgtggttttttcttttttaaatcgtcgagccgagaattgacaaacaaagacagcgacgccccgtggcccgtcgcccaaatccagcattaaaacaatcccataaacaaagaaaaggggggaggaagtgggcaagttggtgaaacatgggaaccaggaaccaggagacatcaaaggccagtctctgttctggttagaaaataaggggaggcactttacctgccagcgtaccggtcctcgccggcaccgccgccgctgccaccgccaccgccaggagcaccaccagtgctgctgcgtgcctgaccttcgtaggaacgtccaccaccaccagcgtaggggtcgcgagcctcacggggaggggcagcagcatcgaagctaggagggttggcgtcacgatcgtagtagccagcgccgccgccaccgctgccgcgagattcctcagcacctccgcgacgttcatcgcggctgtaacggtcatcacggccaccgccgtagcggtcaccgccaccacggtatgcgtagtcgtcgcgtgattcacggcgaccaccatactcacggccaccaccaccgccaccaccagcgtagtcacggcggccatagtcacgtccgtagtcacggccatagtcacggcgatcattgtaagagtcgtagcgaccgtagcgggagtagtcatcatcgcgacgacgccagccgccaccggagggtccacggcgatcatcgtagcggtcacggcgaggaccacctccacggctaccaccaccaggaccacctgggggaccacctgggccatctaaagaggaaaaatgtaagtcgacgtaaggcgcaaggggacaggacgatgtgacttaccacgtttgggaggaccaaagtactttccaggggtaggggtacgagggcgtgcacgtcgagccttctcgatgctcagggtacgaccttcaataacttcgccctggagaccctccttggcggcatcagcctgctcggcggtgaccatgttcacgaaaccgaatccacgcgactccttggtgtggggatcaagcatgatagaacagttatcgacatcaccgtacttctcaaacagacgcgaaatatcagactcggtcagacgcgggtgaataccagtaacaaagaggttagagccagagttgatggcaccttcatcgtcttcctcgacaggtttgcgggccagaggagctctggggtttattagcttctaattgatataccggactagacaaatacatacctgtcatcagaacggccattgggggagcggctgcgagcacggtcgcggtcggctcgaggctcatcgcgaggagaggcgctgcgctcgcgatcatatcggggctcgtctattgaaaaagggtaaatattttcaagcgcatggaaacaattctaaaagacatacccgcgtagcggctggaatcgttgtcgtagtccgccatgatgaaaggactgaaggtgtaggttgaaagaaggaaggaaaagaagttggaaagctgataagagcggacgctaagcaccggaaactacacacccgaggaatcaggcagcggtgcaaacttgcgtggatttcaagtgaattggatgaattggagggaattgggagaataaaactagaggtttctttttccttttcaaaatacgagtttatgcagggggttatcttgactatgacaaacagctattatgccaagaccgaacaaatcgccatattaaagcttgatagtacatactcatacaactaagactaactcctgagattcgacgctaaaatcaaattcgtgaaccctatacccatcatgtccagaagttaatcatcgtgagcctcgcaaacgtagagtccgacgggtattttgttgtgaagcagccggggtactgggggtctggcccttcaggtctccatcatcaaccaagtccttcaacccttcgagttcatcttcatccaattcactgagttcttcactcattccacgcatgacatcccgtccagtccaccgttcctcgtgaacagtcgtaccgacagggtcaaagggttgcatgtaccattgaatgccacccaaagccaaagggagctgctggtcttgctcggtcaaaacaggcgttggatgtcgacagtaggcgttgacactctttatggggtcttcagcaggaggtagctcttctgccccagatgcttcagggtgttgttcacctgcagtaggctgggcttctgatggagcctcggtcgtaggaagcgtttcctcaactccttccatagcatcagggtgaccagacagctcagtatcaccttccggctcaacagaatcaccactgcgtgacatcacactgtggtcaagaatcatatccagctccttcaattccttctcgaacggtttgcggttgagttcgctctctttcctgatcgcatcctccagggaaggctggatgactttgattatccgctttgccaatttcctcttctcgcgttgctccaggctgagctccggggcgcgaccactgatctgcgcttggagttccgcggtatcgccagcgggctccacgccgatttctgaggtgaatagactggccaagtcagaagagaaggcagcgacggacggatagaatcgttcgttgagcctttgtcggattgacatcaaccctggtgcaaacacaccctttccatcgagcctagaatgaagtcagtatgagcgttgacaaactaggacgagtatatctcacagttgagctttctccaatattggccacagcaatgggaatgtagggaagtagacaagatcgacgatgttacgaagcatctctgcatccttcaacttctccctctcccgtttcttcacttcgtcgcatagcattctcaatcgatcaagatccttgtaaagtcgctcaccaaactcaatgcgacgctctagacgtctgtgtccgggtacacccattgctacatagtctcttcgtgtcatttccatagatgagaaggtctccagctgcaactggagtcgcttgagcaatgctgctccacgcctcgcctctcgtttcaatgtccaatacttggatgcatcttcagcatattgcttcctttggcggactgtaaatcgcccgagagaagcaatcactgagtttaacacaacctgggggataactggcgcaccggaaggcagcttccagattgttctgggaacacgtttccgtttatttccaccgactgttaacgtaaggcgaggagtgagggtgcgatcttcttctgctccatcattggggtgcgcagggcccatcgagagagctgcagcttggctgtctccccagcgtctaccttgcatagtattgcgatagtattcgatagcatcggcagttgcagcatcagtaccatgctccaatcgccagtcagaaggaacgtgcttgtcgcagaaagccttgagaaggtgcgagtccataagaccatggccaatcttcatctttagataaagttgagctctgcgtgcacatgagacatggaaagcaacaaagcagtttttgttgctgcactgaatggatgcacccatccgctgtttgcagatgtagcaattcaacttccagcggctgcgtggaaccttttcgacatcggtcaccggctccataagagatggattaccaatagaaacttcaggaatccagaaagagcagagtaaatgagcccatttagaggaggttgtttgtttgaatgcgccctcagtgtttgggcagaagatacaattggtggatcctcttcccagcaactggcacttgcggcagagccactgaccttctggaatgaaaggaacaccataacactcttgatgcactgcaaggtcgcagccatcgcagaaaacaattgcattcgagttttcacaatcgccatcatcacagatagcacacttgctgtcttgttcttcgcccggtcccgctgtttcgccattgactgcagctgccgagctagagcgaagacgtccggtctgcgggggtttgggattcggcttggggatgcgcttctcaagggcatgccattccctctcaattttggtcatggtaatctcaaacacagcgggcttgatgggctcgagctgatcttcacggcgcttggcattgtattcctccaaccatttttcatcctgttcatccatgtcatattccacacgtccaatggtagtgttaacgtctccatctgtcatggcaggttgaatcacatcaaggtcatcttcttgggtgccttcggtcatccgaataaatcgccggtcatggcgcagaaagagatcactctcctggtatcccacgtttgccatggtccgatcgacatagttttgatgaccgacgcccttcttctcatagaatgtgaaagggtcacgcagtctgaacgacggtttggggagtgtgagtttctcccgggggtttgggcccggaggcggtatgattttttgtccttgctgggcaagaagggcattaaggatagcctcggggcgacgaggtggacggccaggcctgcgtttgattgggattggagaggccatttcgcctgatatgatgactggtgatcctgaaaggtccgagattgtcgcaccagccagtgactccaggcttaagataggacctgaggtatctggagcatcaacctcttcagacgtgaagacagcaattttgccatcaatgtccaagtcgggatgaaactcttcccacccgcgttcttcgcgtggcttgtacccatcgccttgttggagagcaagagcggcggccgttgaagaggtgaaccgaccacgggcttggttcttgtcgcgccttggacgcgacatagagggcggtgttgttggtatgatgggaggtggcggtggaggggctagaaatggttgctccatctcatgtggtggacggcttcgagcacttgcggagtggcggcggggagtagttctcttagaagtttctggggcagtggcggcgacgactgctgcttcagcgtcgaaatcgatgaatcttcctcctcctccagggccacctggaacgtactttcgcttctttgaaggagggccgtcaggggaatcgacggagcggctgttggatgatttgagggaagacctaggtttactgcgtgatgatcgacctgagattgaatgtctggccgtcggtgccataattcaagaacaagctttcgggtgtgtatgtgctcgttggggatgaggattgttaatcggacggcgtcaggtcgcgttcagggcctgactcaggcagggcctcgggaaatatcaaagtcgcaagtatcaagtcatgcgacaggaaactagaaaaagaactagacacaatggacgtaaaggacgccagagcccgtggaacctgcaaggcgcgatgaggtgtttggttatctagtcaaggcggagacgcctgagctgtctgggccttttggcctgaggcgccaatctggacttgaagcacctccgcaggttgacatgggacatgacatccacagctatcctttgcgacctatctgcgattttactcattcgatcgagccttgattttttttttctttcacatagatttacaacatgagcggttctagcgacaccaggtacgcgttatctacctcaaaacaccgcgcagttcagcttcgctaactgttattgccctcctcagatggcggggcggacccagtcgccagggatcgcagcgcaactcgaacaaccgtgataaaacaggaggacagggaagcgcacgggataacaatgctacctggggcgcatccaaccctccgcaggaacagcatgttcctgtacggggcttcaacaccgcagaggtcaagaacgtcctgaagggtatgtatatgcatctaatctccaagtacaagggctaaccaagctttcgcgatatagcaggacctcatggtacgccttatcgctgcctccatatatactcaagcctaacctatgcgccatcgatacagaaaccaagtcggcggtgccctacaaatctcattctaaagacggccctacccaacgatctactgcctggggtgccaagggtacagtctctctttgatcgcagcatacccttgagcgaagaataaccatatctacagcacaaaacatggcgaacggcagagacttcttcctggagcttcggaaacagattacttcgctgcagcgaagcggtccccctgtcggcggctgatcacgacgtttacgacttcattatctcaaagtacttgcattgcacagtcggtcggtcgcgagtttggttcgttttcatgggttgctacggcgcatcttcgataccctactgtggaggatgcatgggtgatgagtggactcggaagttacatggcatcggcgtctccgatggttctgggtcttacatgtccataatgcactatgactcctgtttttcaaatttattcattacaattcatgcgctgcatcgaagtttatggcgatgcattattttacacacgctattatacagagagggcatgtcactaatatacaagcaggtagccattcagctacaattttcacaatttgatccacccccctgggccaaggatacctccatcatcagcctgcgagtcgagggtccatgtccgcagaggacgacagctgaggtcggatcggaagccagcttcgaacatctcaatgcccgcccacccaatcatggccgcattgtcggtacacaaatatggaggcggagcaacaatcttgatatggccaaaaccgcgcacttccaaaaatgaagtaagcactttcatgaggaactggttagcggcaacaccaccactgacaacgagggtgttgatgtcattcttgccattattgtgcggccgcagagtctccagagcgatgacagtgcgcgaggcaaggtgctcgaaacagacgcgcatggtttcccggcctagatcgacacgctctgcattcgatatcttaatattcgtaccgttactttgaatgatcctgccgaccgtgctcgaaatcgaagcaaagctgaactgcatatgccgcgtattcgcaaatggagtcgtaagataccagccccaatcgcttatgcgcttggctatttcttcaccccgagtctctggcggcgagtaatccgcaaaatcggccttgccgttagggaagacgaattgctctagattcttgccgtacatggtacttttagcttcttgaagcaaagaatcaggtagaatatctcgtgcagatttatccagtgcctctccaatagcgatatcgtcgctgttagcgagaatcctatgttctgtgaggccttccgaatgaaccagagtcgtatggccgccagaggcgagaatagacaagaaagggaattcgggcggtgtggatgggtcggccttgagttcatttcccaggcatgaaacgagtcggggtgtcaaaagatgtgcctgcatgtggtgcactccgaccatggggatctgccatgcaaccgacagcgcttttccagtgtcgaggccaacggacaggttagaccgcattccggggcctcttgtagcggatatgaaatcggggaggcggcgacaagtcccatctgccaatttaagtccatcgccagtttttgaccccggtaggtaattaagggctttctgtagaagctttgcgaggttggcttggtgggattcgagagcgatgatagggtgaattccgcgatgcgcgcgtgtgtcggccattacattttcgaggaaatgaattttggccgtgctcccggagtctttctttgttttctcaacgatagctactgatgtatcgtcactgttgttggcaaccaataattagttgagtgaccttctttttcgggtgttcatctccgcttaccatgacgtttcaattgccaacgtgagcaagccacggcgggaggctaaacatctccctgcatttagcgccgacctgcgaaaactcgcagcagggctcactgagaataacattggtaaaatgcttgacgtacgatcggtggcaggggcgaaaaagatcggaggcgcacgggccggagaagcccttgaatggagccctaaacaggtaccaaaatagccatctatagtgatcgagctacggagtacgtcccaaagaatcctacatacaacaacccaacagggattggttgggcggaagctaaggccggtatcttgctattggaatcgcgcatatatggctgaggatagttactattgtatttgcactaacgaacgactaggttaaacatttatactcaaaaatcaaaatcatcaatccagatcccatcataacgtcataaatatattgtttctccaaggcactgatacatcgagttcccttcagaatgtgcggcgcgcaccaaaccccagtcagcccagatgaatgatactgacgagttctgggccagcaaaaagcgcgaggcggcatagtcatccacagaaccatcttgcgaaggctggacggatacgttaatgcgcccttctgtcgtttcaattcgcagtttgaggacgtcgattgtcaggagcgctaggtgctccgtaaattgatccaacaaaagaaccggggtgtagggcgtagcatcattgcaagatgtagaccccgaatcattcagaagcacctggtcgctcccattactccagccgtgaaaggtcattaatgataaaaatctcgaacatgatctcactgccggaccgtccatcgccgctcttctcgtgacatcttcatgtgcttgccgtaatactcgtctggattctcaataggcgttacgcagtgaacagtcggtgtccctttgaattgtatacgcttgtcaacagtgccagcgcgagaggacgactgcttcttgaggatgctctttgatgaacaagagtttgtgtatgcataattcggaacctgcagtgaggaaaacctcttgctcgtcgggctcgccgcggagattggcgagacaggcgtgcgagggagagcacttggtgacttgagtgatagcgatggccgaggaacattctgcgcagcagagatgctcaaggatagctttggcttgacgacacgggcagtgtacattgtgacggatgaagaagtttagtacaacagtgcagttgatgttattgcgacttggttttcacggggaaactttgctcaacaaagatatccgagtaggcaaggagaggaacaaattattgacgtagatgtataaggagctgaagaacttgggccagccaaggcgaagagacaaaaatagaaaaataagaaaataagaaaataagaaaatctcaaacgatacggagtatgcaaaacagtctcctgggggggaaagagggcggctatatacacttgagggggagaggggaaccaaggaggactgccaaccaccttcttctgcctaagcgcctactctatgcacgacggtgcatatatcacaatcactatcactatcacgcccgagtttctaaacttagacaagccttcattccatgcagccaattaaattccccacggggtgcaactcccgtctaatgtgatgtgatggacgggctgtccaacatgccctgcagccaactgcacatggtcttccaccctggtcttcttccctggtcgtcctgtccatttgattcgaaactctcgaccgatgatcactcaataggtgagggatatcgcacttacataaagtggattcctgcattattcggtgatatccccgcattatcacagtggctggcagtcagcagcgaaatatgattggtttgaatcttggcaggattgttgtgacctactataattagatatcacatgggtttgatgccgctatcaactatttttactcgagattgagcgatgaatgatgtccatcaatccttcgatatagtagacgcagttgtaacatattggtcacatttcgtcttttggggagccaattgacctctagtcctgacaagataatgctcatctatgttacatttctcttgcgtgatcgtcctagtgactcgatttccttattttcaaatatagcacgtatctgtacggagtacgatgcaatgattgaatatgttttattaatagtgcatctacaaccaacgaagagtggttgacatgtatacatatggagtacgtactatacttactcggaaaacaccaggggaggaagagattggttatgacatgagcgactagctatccaaagtgggcgtatgacttgacctgataccaggtggttagaatgcaggacaagcacatgggacaaacatatatagaaaacacgtaaagcttggaataaatcactcactcgagctcctataagtttaggaaatagcatcctacggggggctcagtgttcggacatagcttgttatgaggatgaagctcttgtttgttcagatcagttaggatattgagctgtgatgggttgggataaatgcatcttgggaggagatgggcttgtagagatattgtagatcactatttgagttcatggttactatgaataactaaactcgaacaaaaattgacaatgtctttgttttccaaggtgtactccgtagaagtcttataaagaactcggagaagaagtggagcgtatgagcgacgacaatgctactgtatatgtactagatacggagcatgatttacaggggtatcttattgatccacctttgataaacaaaagagtccgccatttctcgaagatgttaacctcgggacatccataaaatgagtttaatatggccagctgggacttggaggttctatattataacagcctcggtagcactgccagatgtaagggcactcgctaggataacttgtattcctcgctatcttagatatagtaacccgctttcgaattgattgtttgtctcctctataccgcggatctgcaatcttgtatggagacatcgtctagaatccctccgggactgccggcaaacctttagctgtcaatcgtttctggagctccaaaggcttaagctcaagaaaaggaccctcaagaccgggagtcgcgggtgttatagctacaccgctacaccccactactgcaatgtatgtgctgatgatcctgatttataaatagaataaccgctgtcagtgagtccaacccttgcaattgagtttggtgaaagccggagatgtttagcatgaactatagcaatagctagaaagcatgccagaaagcatgcattatctgatcgattgcggagaaacaggggataacggtagtcacatcaacacccggactcggctcaactccggcaggcttgggaggagaggggaaaagacgagatgagccaatccaagtggaattctccaaattccttccccaccgcactccgcaccgaactcggagactttccttttcgtcttttcgtctttttgtcttttcgccttttcgtccacagactcaccggttccgaatgggccatgtgacaggatccggtttcttcctcatctgatccttctctttgaaagtcggctgcacgtctcgggtagtgtggtctagatcccgtgtatataccgtggctcatggcgagaaaccaaagggttcgcgaaccagaagtactagttgaggctaattcagggacacatttctatacataacatatactatgtagatatcgagatatccataatgtggagatcggtccaaggcgagactctccgatccgggtaaataacacgccataatgagaaaccccaagggatcgaaaaaaatcaaaaaaaaaaaaaaaaaatcaacgtggccacgacaacgaaaaggtattgttattagagaattaaaatatcaaatctatctagattacgaatagtcactcaaatattataagaaacaataaggaaactttgcagagtgggctccttatattaaagtatcataactttttctattgactcagtcctccctcttctccacatccctcgctcccttccttcccccagtttttctctttgtgcggccgattttttttttgtttagaactcaaaatcaacttggatatacacaatggccagcgtaacagaagctgtgaaggaatcgttcctgggccacaccgaggggcctcatctgtccttccaggcgcgctcaaacttcctccgccatgcgcaaaaggacgagaatggtgacctcttcatggatgaggagaacttcatcgatgccgtggcaccgaagcaggaagactatgtaagtatcaccacggactgcagaggtaccaaaatcttcgcaattgctcatctggtttcctaccgcggcagcacaagattaagcgcgaacaatatggcatccttttcagcgtcgcagaccgacggagagccggcaggctgaacattaccgactgggcctccttcgaaaacctcctcgcgaagcccgacgccgagtacgagatcgcctttcgtctcttcgacttcgatggatccggcactgtcaacttcgacacggtgcagggactgtacaacctgaacaagagtccggacagcattcccttcaactggagctcggagtgggcatcgctgtacggaggccgctcaaagtctcgccatgacatgacctacccccaattcgcccagatgctgcgcggtctgcagggtgagcgcatccgccaagctttccacatcttcgacaaggatggggatggctttatccagcccgaggaattccagcgtatcatcctcgagacctcaaaacacaaactctccgactacgtcctggagaacctccccaccctgtgcaatatctcgacgagcaaccgcatctcttacgccaatgtccgtgctttccagaatgtcatgcgcgagatggatatcattgatttggttgtccgcgaagcaatagagaagagctccgatggcaagatcacccgtaccgacttcctggacgaggccgctcgcgtgacccgtttctcgcagttcacacccatggaggccgatattctgttccacttcgctggcctggatgcgccttcgggacgtctctcgcagcgagactttgccaaggtcatcgatgcttcatggcgtatccccgtgatcgctgtaagccatgccatgactaccggagaggaagttgtcgagaagaccaagagtctgctgcacaacgttcttgagtcggctcaccactttgctttgggcagtatcgctggtgcttttggtgctttcatggtctaccccattgatttggtcaagacccgcctgcagaaccagcgttcgtctcgccccggcgagagactgtacaacaactccatcgattgcgctaggaaggttatccgcaacgagggtttcactggcttgtactccggtgtcattcctcagttgatcggtgtggcgcctgaaaaggctatcaagctgaccgtgaacgatctcgttcgtggccacttcacagacaaggaaaccaaccggatcaagtaccctcacgagcttctggctggtggaactgcgggtgcttgtcaagtcgtcttcacaaacccccttgagattgtgaagatccgtctgcaggtccagggtgaaatcgcaaagaacgtcgagggtacccctcgccgctcggctctctggattgtcaagaacctcggtttggtaggcctgtacaagggagctaccgcctgtcttctccgcgatgtgcccttctcggccatctacttccccacatacgcacacttgaagtccgacttcttcggcgaaaccgctacaaagaagctgggcgttgtccagctcctcaccgctggtgccatcgccggtatgcccgccgcctacctcaccaccccatgcgacgtcatcaagacccgtctgcaggtcgaagcccgtaagggtgaaaccaagtaccacggtctgcgccactgcgctgctaccgtctggaaagaagagggtctggctgccttcttcaagggtggacccgcccgtatcatgcgttcttcgccccagttcggtttcaccctcgccgcttacgaggtcctgcagaaaaccttccccatgcccggtgagggcgaagccattaccccgactggcttcgtcgagcctagtgtcggtgggcagggtgctaccgcgcccctgccttacctccgatcaaggaacgcgctcaagatcatccttgacctggatgagaactttggccgtgtgaagatcccacggcctgagaactggcccaacttcatgcggagctcgaagtagacaggcttgctgtatctagtgaacctgcgatttctagtctttgtttcttcatttttgttactagcgatatgtttcccatttctcatttggtcaaggcctacctttccctcgatttagcatgagatctttctcacatttcttttggattattttcctctccgccctcttcatggttcaattgggcttgatttgggacgtgcatccacgcccccctttgcatcatattgtcttctctttcttgtcggagaacacctgtgtttgcattgtaccaatagtagatagatttggaaagaaggtgtgtgggttgtattagaggccctggttgtggtggttctatcaatctagatctggtccgagttgttattctccggtttgtgtggatggaagcgtagatatatatatggccggatgtggttcgtggttgatataagttatgcctagagagcagatagatcctgtctagagcaacggaatatttggctgcatttgtattgcagtatttaaattttattgatttggagttatctatctggaaaatatgtacatgaagcatgatttgcaagttcgcaaacgggtatcggaatctactctcaaggaaagattccctgtacagatgatgttacatttatatcctcgaggatatatcggtcatggactggggccatgtgtgggaaatgccaaacccaattgtcgtggatagaggggaatcctatcgtgatctagaagatcaattcgacatcttaagccggcagcggcctaatggggtagtgtataccccgagttcacaaggccgatgctcaagaccagaggcacattctcgatgaagaccaaagtagtccccattcaatagaatctaagctttcgtgtcggctctgtcttaggaacctcatcggtgcctttgccttccgaagactgtgcgggctgcttttgttctttctcgggctcctggcgcttctctgcttgtgtctgggcggtcttcttctcatgccatagggaatcttcggcttcaatctcgcgcagcactagatagaaatagtcagacaccagccctcaaaatatagttggatattggctaacacaccctcatcccactctcgttcctttgcctcatcgcccgttcccagtaacttctcaacatcgaccttctctccattcttgactcgtgcaataatctccgctagaagttcgatcttcgcatccgtcgtccgagtatacgccgcatagccgttcttcaaggtgagcatgcgaatggcttgcgacccgatcagggtaaacatgatgatgtagaacgtcgccgggttccattccttggatttctctttcgcaggatccttgcgcgccctgccaccccgaagaaatcggggaatcattgccgtccatactgacgtgtctgcgatcttcggaaggcgatcggaggtcgaatatgagcgccgagtcggggcgcggcattgtctggtagcatttgacgtagaaggagcagaaaatatctgtctgctgagcccaaagggcttgaatctgaaagccataacctgttcgcgtctagcagcaactgtcggttctcagaagcgggaaaagttgaggtcgtggttgcctgaggcgataaggctatcaacgccaaatacggtatagcgcagttgttgctgcgacaaccccccgtttacagtccggccgatagcgattgcacatcaaaggcttgacgcgagcgatgacctcagtcctgcagcttcaatagaacgaccgaaaaaatggcggtcaccgtcttaccgtcaagctctctaacagagtccgtgaaacaggccctccgctcaacgacaacatgctcggacgctaccgtgttgtccctccaaacactcctccgcgggtcgccaaagatgcccgagaaacccacgaaacgcacaaaatccacaagagatccagtcgcggcgccgagccgaacgagaaattcccgcgcgacaaagacgaaacctgcaaatgatgctacgctccaatcattcgccgatcacgatgcggcggcgttgtcgtgtcaggagaaactggtctttgctacagaggtattcaacgccacgttaaagaccctcacggacgccgcgaaactatctacagccaagcgccagaataatacatccgacattgccaatgggcccgacgcaggaatcgtctcggctgcggagtgtgcgagactttctttgtccacactgcgcactctcaagaatgatgctgggaatgacctgttcccgaacatgcagctcgaacaggggctgtgtgttcttgcgggaaagcttatttcgctgggactgaacgacatggcatataaagagcttcgacttttgaagcggagaatccaacaacatttggatcgcggaaaggccgggaagaagaccacagaagcaaaggatgtggtggaagaagaatcttcgaaggaaagaatgtcggatctcttgacgtttgctcacatctcgaacgcaaagtcgctatacgccttgcttgttccctttcactcgaatgtgatgcgcctatttgctgcggataaaagagcctccacgatccaaaaggcttgctcttcattgcaactttctgatgcgagtagtcctgctcaagttattttggctgccttgaaatcaggccaactatcaaatgacaaagctgctctccaactccagctattatcgaataccgttctatcgctttgctcggggacatttttctcgaaggatgaggcctcgaatggcttgaagccaatgacctcattggcccttcaattactttccctcgaggttcgatgtttgggctggaagttgtccggtcatgtctatgatgagagcaaagaagtatttgatcctttgcttcgctattttggtagcttttctcaccggagcaagggtattgacaaagctgagtttgcttcaatttacaaaaccgttacccggttgcaaacatccattgcagaggtcaagaagaagtattcagaaacacaaaacgccaaccaggctgccaagctcatgactattctcgggcagcttgctttcgacgcgggttgttttgatgagtctatgaagctgttcacggaagccatcaatccgctttcaaaaacccagtctctttcgctcgcaacagttcggtgtaaaattgcatctgttcattttcaggcttcgaagacatcaaaaaagttcctgaacggagctttggattctgtgtcagaggcgactcaatccctaggattgcaattaagaggcagcgcaaacgatctagatgaactgctggtggaagctgcaagactgaagaagctggctcttgcgtggttcggagaggctattacaaaaggttctgagagcgaaagcgcgaaaaacgaagttgctagtcaaatcagggaatatctgcaagcgtttatcaggtttctcagacgctttgttggacgccaaccaacagaagacagcgacgaaaatgagatcgagatgttcaacaaacgcatttcaatttctagaagcatcattctaactgccattgactctactgtcgcaatcgggaaactttctatcatgtctcagaggccaccttgggaagacatgcttccaattctggctgatagccatcgcctgctctcgaccatcgaaaccaccgatgaaaataatacagagatatcagaaggcctagggatggcacttgtgaagctttcaaacttgttctggtctcgatacatcaaggaaaaagaggccggacagggttatcgagacctcataccccttctcaaacaatctgtccagctactttcaagttgttcgcctcctcaacgcaacacggcatttgcagctctcaagttcgagagactggctcatctttacatcgagggcaacatgtacattgaatcagagcaaatgttccgaaaatcgattgaagaatacatactctctggcaccctagaccagattgctaagagcagcggaggacagaatccaagttcgctcaatctggatcctaagagccctggtttcatgcttggccgtgtattttctgcccttctgaagatgaagctgcgcaggaagggatcccacccgtccgttgtctatgatgatgttgaactagaattcgaacagagatgtcttcttattgaatggcagatgagtttgcttgttgaaatgcctggttattcttcaaatgaagaagagtttcgcttgattctcggctcagctgtttcttcactcctcgatctctacccctttgacgtctatcctattcgccgttctcgtgtgattctctctgccttgcggcttctattggagcagcccactgccttggattcgtctttgattcaatccctgctggatgcaggagcagaggctttggataccggcttacaggtccgagaagatgtcgatcttgcttcatttgcaatccacattaacaactcattgcgcgttatcattggcttccaccgtggcaagatcgatgcaagcgaattagacgacacgcttgcgtcgtggaactcgttggcgtcccagtcccatgactggaaaacattgctgctctgcatcaatgacacggactactgggtcctgcagctgaaggccctagttgattataccgaaatccacgggctttggaaggctcagctatgcaccctggaacttatattgcgtgccgcggagctccagcaatcaggggatctgtcagacgctatcataattctgtcgcgcttggtactgcagaattgccgtctgggctactgccagaaggcaggtgaactgctatcgcgtggtgagcagtatcttgcgcaaaccaaggtttcttctcttgctaccatttcctataaagtcgcacgggtggaatatcttctagagaccggagagatcgagaaagccgccgccgttctttcagcagcccgctcactgtacgaaaaatgccaaaggtcagaactaagcagcttgactgtcctgtcgaagatctcatgggaaagactggtagcagatgctgcctttgttcagtccaggttgttctccgtacagggctcagcgacccaagctctgtacttcgcaaagttgtctgtaaggctcaactgccgcatatgggccaaggttgagagactcgcccaaagaaagcaagacaagctcttgcctgcttcagggaattctgatgttgaggctgttgctgatggtatagcaaagcttgatttgtctcagaatgggtgttccccggatgtgtctgccagctacatccaaggtgcgcctttctggcctcacctaggttctcaccatacctgcttgttgaacctcgccactttatctgcccaccatggcttgttccaggatgctatctattacggcgaacaagcgctgaagattgacaagacccttgatgccaatgtacggctactggcggcgcagacccagctcggttgccattggattcttagtggccacatgaacgagggtcaggatcatctctctgcagcggccgaatcttctaaacaatcccagaacagtattgaaacggtgtcttttcaaatggcccttgcgtctctgtacaaggcgcaaggtgcacatgacaaggcattgcgcgttctccttgaagcagataaaatcatcacagcggtcacctgtgccgatatgactgctaatctggagatgtcaggcatggcagaaatcgaagaaaagatggacaagttacgggttagagcaaccagccggcgaactccaacacctcgaaccccgacacctacggctagtactactcggcggacacgtgcaaccagttccgctgctcccaaaaccccaaagaaagctccagctccaaaatcaattctcccggacgttcaatctcaatccctattacaacttaaaggcaacatccttcgacagcaagctgattgcctgcggaagttgcgtgactttgagcgatctgcgcaaacacttgcagaggctagacaatttgccgtggcccgagaaagcaagatcactctggagatcggtgaaagcgagcacctgttggctgatgcaattcgccgctttgccagccatgctgtgtactgcgtcttacccgaatctacaatctcgctgccgtcactcaaaacaccaagcaagacggcagaggagcctaatttacccccggcaagaccgacaaggagaacgagagctcccgccaaaacaacgcgcactaaggctcaacgagccagtgatgacttttcggttatgctgtctaaggcgagcgattgtcttgccagtgttttctccgatgccacaattctaggctcgacgcttgacagccatgcggcatctcgcttgatgagtcggatctctatgctatcacatgcgacttcccctggaataccaacggctctggcccagtcgcccgcaaatatgaatggtaagttttgcgaggtcctttctggttgacggatatctgacttttcaattagagattggacgtgttggcgcatttgcccgggagcgcatggcgattgatatcgatcgacagttggccgattttgccgaccctcttctttggccaacctcgttcccttcagcggtcgagcttgacaatgatctttgctccaactttacacgagattatgtcgacattctgcccgagacttggaatgttctttctttgtcattgagtgcagaccataccgaatttgtggtttctcgactccaaaaagaccgctcgccattccttctgcgccttcccctccaccgaggaaattcagaagatgatgatgaagagcaatttacctttgaggacggaaaggaggaaatgcaagaactcattaagctcgccaacgaaagtgcacatgcagccaaggcccagacggacaagttgtcgaagaaggaatggtggaagacccgcgaagcgctcgatcgtcggatggaaaatgtacttcaaaatattgagaacatatggtttggagggttccgcggtgtgttttcgcctctgtcacgggatactaccgcgctggtccggttcgcaagcaccttccaaagcatccttgacaagcatcttccttctcggcaaaagggtggcaaggccgctggcccccgactcacactacatcagaatgtggtggacttgttcattgggcttcgcgatcttgaagaacaagaggagcccgaggacacgctgatggatcttctttactttgtcgttgatatcctacaattccagggcgagcgcaatgcctacgacgagattgacttcgatatgatggtcgtagataccctcgatgccttgcgagggtatcatgaagctgcgcgcgatgaacttgcagcacggccgccgagacatacaatcctcgtgctcgataaagctctccacctattcccatgggagtcacttccctgtctccaaggataccctgtttgtcgcgtcccatccctcgaatgcctcagggaccgagttcttcaattccgcgaggcatcctccggagccattgtggaccgcaactctggtggatttgtcctcaacccaacaggcgacctgcacacaacgcaaaaaacgtttgaacaagatctctcccggttcaaatcctggactgcaattgtgcagcgcgaaccaactgaagatgaattccgcgacgtactggaaaagaagggcctattcctgtacttcggccacggcagcggcgcgcagtacatccgcggccgcacgatcaagcggctcacgcaatgtgctgttactttcctcatgggatgtagcagcggcactttgaccgaagccggcgagtatgagccctacgggacgccgatgaattatctccatgcaggcagccccgcgctcgtggctacgctgtgggatgtcacggatcgggacattgaccggtttaccacgactgcctttgacgcttggggtctggtcgaaaagaaggataaaaaggataagagccgaggggaggatgttgggcttgacacggcaattgcgcgctcgaggggtgcgtgtgtgttgaggtatctcaacggcgcagcgcctgtggtttatggagttccggtgtttttggagtgaattgagttcatgtttctctcttattttgtatatatacctggcgttttctccactgtgggcagcaatctgatttgactcttcatgctcgacctttcaatgggttattgttaatatatatgtccatctgttatggtatatcctatctaaggtgcagttaatagactagacaatgtccaatgcagtagctctaaaccctgacatcgaatatcatctagatacatagactatctatatactcctgtaaaatctataaaatccgaaataggaagaattatcctatcgaggtggacctcttttcccctcatgcgggacacattccccccaccttaaaacgtcaacgtctcccggctcgtagctttctgttctctttcttttctccttctaacattggaagatacatcaaaatgtccgtcaccacaaacgcaaccatcgcctccttcggtggcaagctcttaaagctaagccatgccgccacaaccacaaaatgcgagatgaaattcaacctcttcttgcccccgcaggcccagacacagaaagtccctgtactgatctacctctccggtctgacctgcaccgccgataactgctccgagaagggctttttccagcacagcgccagcaagaagggaattgctgtgctgtaccctgataccagcccacgtatgtgtcttctgttttatcgcgtgaattttccatatacctttctatcaattgaagtcatacggttgaaaagtaaagaattatataattaacatgctcatcttctaggcggcctcaacatccaaggcgaggacgatgcatacgacttcggctccggcgccggcttctacgtcgacgccaccaaagccccctacaacgccggctataacatgtatagctatgtcaccaatgaattgccacagaccgtctttgctgctttcccgcagttggatgccagccgtgttagtattactggccacagtatgggcggacacggtgctctcactttggtaagttatacactgcggcacaaaagctggaaagaatatcttgtattggagtaatatttatctaaccattcatcagttcctccgtaacccaggcaagtacaagtccgtctctgccttcgcgccgatcacgaacccgacgaactgcccctggggccagaaggcgttcaagggctacttcggcgatgatcagcaggataagtggaaggagcacgatgctaccgagttgattaagaagtggagtgggggtccgctggatatcctgattgatgtggtgagttatctcctccctttcttctgtgtatcgtaacacgtctaacctatatacagggcaccggcgacaacttctacaaacaaggccagctgctcccggagaacttcgaggccgcagcccgtgacgctggaatcgccggcttgaatgttcgctaccagcctgactatgaccactcctattataccatggctacctttgcggatgaccatgttgagcatgcggccaagtatctctttgcatagtgtgtgctctcttcttaactcctaatctcaaaaccattatgttttacttcttgtcttgcgtatttcttagtaaacgggatctgattggtttttcttttggctcaagtgggctacaggctgttcggtcgatgatctagatggtgtgagaaccgaatgagaaggtattattatgctatggatagtgcaatcatcttgcaatgctaactcaaggttaccttatgctacacattttgccggggtatgagtgacttacatcgaactttcctgaaatagctttgatgtttcgctcaagaactagttccgtaggcttgcagatcccaaagccttctggtataccgatccagctagttgggatggtgttctcgttgaaaatggggcgtattgcgtggattccaccttggccttcaataaccgtaaatcctatcagttgctcaccgtagaaattgagtgtgacggaaccccctggtagccgataccccaaaagtacatttggcctttcgggatctgcattcagcaggtcgaagccagtaatataggtctctgctccctcacgttggatagagactgctaagccgttgatagagctttctaatagaacgacttgagaaaagagcttatgttctgcccagcaaatgcggcattcattctcttttcccccatgtctgttttctggtctgctgtctctatcgcatcggaactcagtagaaacctccttccagcataactcattaagtaacccctggttcgagacaatatgctcgtccgacgttctgatcatagaacatctttctattagccatcggttatttctccaccgtcgccgtgttgcccagaggtgctcatcacaccgatcgatccttgctgtacagcggtatatgagtcgccagtttttgctctcacgttttctgggattttctgctaggcagttcagaaatccacgatctccattctgtgaaaatcttgacttccagaatgattcaattccgaacacaactgccattgctcgggatgattgccgtagtcttaggaagtcagcagtacgaagataagttgcgatttgaactcgtatctcgagaggcaggatgctaaagcagtcagagtcatgcacaactctactcttcgagccagagtgctttcgtcttttcggcatcttcgggaattgtctcgcagcatcctgaagtcccttgataatgggtcgttttgcagggcgaaaatgatgccgcaatccgagatccccgcagttgtctaggtctgttaaaaaagccggcaccaatattgccatggccacttactccaatagtctcgtcttcccggaggaggaatttccttacagacttcaaaaagcctgtttaaatcaatatcctccccttcaaattgctggaccaagagagaccagcagctctcatggactaagaaagccttgtggggcttttctatgtgcatgaaataccaagattcaagtttattaggatcaccgaacgcttcttcaaccacccagtcaaacttggttttattaacacctgacagttggattccgcttctggtccgatatactatggtggatgagcccggtgcaagaagtgtacttataacatagggatcaaactcacatactcggtaccttgccatccaaggagcctcagggcaaatagttgctgcgcaagatacacagtgactggaataatcagaatcactgttctccgtaagtaagctcatctggaaaaatttgagaaggacaatctgatgtgggggcagagatctataaatatgccaatctgtagaggggtcactatgacctcagtctatctatactcacttagaatgaccttattgaagataacatgacaggagaactgcagtcgaatcatctccttagataatagcccagagagcaatactaataagatagttagaagattagaagtctgacatgtgtcttccttaaattcaaacgagtgatatttgtctctgattatatttcatcccttatcacccttggaatcgtctctccttaataagtgagctcgatttactcacttcgctttattgaaacaagtgttcttccatcgctacacctatcaagcctcattggctctcgtgtccactatactgctctattgctaaacagaggctttttgttattcgtcaataagttttttcctctgcaatacccgactctaagatattgtttctcttctttctactaaatcagtagattcgacaaagaattacatcaaacagttacaagatccacttgtattgcaaggaggcgcttggcctaatgaggttagtataggtgattacctaagcaggctaaaattcacgatgtcctcggtagcctcaggcatctacgctaacctattttggctaaaatggcctccctacggcgcgccgcaacgcgaactccagaaaccaaaatcacaaagctttcaacccaactcgacctcaactctcaactacctttctcatctgctttccagtcattttacacctcttttctctgcattttatcctctcaactgcgacaattttacatacacaagctccattatgtaagatttttcgcagcggttcccgtgtctggcactgaccatcctacagggagagcttcgacaacatctacttagacctttcaaagcaacctggaaaatgcaagcttgctgaaagtggtctgggctggcgtccgtctggtggtggcgatactttcacgctcgacagcagcaacatcggtgcagcccagtggagtcgcgctgcgaaaggctttgagctgaaaatcctgtcgcgatcgtctggagtgatccaactggatggattcgaccaagaggtatactacaccgaacattttgcgaccattggcctacagactgacaaccgaaaaggacttggagcgactgagcaaagcatttaagatttggtacggcattaacgtggagacccgtgagcacgctctgcggggatggaactggggcaaggcagaattcacaaaggcagagctggcctttaacgtccaaaaccgacccgccttcgagattccttattccgaaatttcaaacaccaatttggctggaagaaatgaggtcgccgttgaatttgccctccctaccggcgacggaaacgatgccgtgacaaagcccggaagcacaaagaaccggggccgcaaggctgctgcaggccccgacgagctcgttgaaatgcgattctacattcccggaacggccgtaaagaacgacaaggcggaaggcgctgaaggcgaggaagaagataacgaggaagaggccgaggaacagaatgctgcaaatctcttctacgagacgcttatggacaaggccgagattggagacgttgccggcgatacctttgccaccttcctggatgttcttcacctcacgcccagaggtcgcttcgatattgacatgtacgaatcatccttccggttgcgcggaaagacatacgactacaagattcaatattcggccattaagaaattcttcctccttcctaagaatgacgatacccacactcttattgtgcttggtcttgatccccctctgcgacagggtcagacccgttatccttttttggttatgcagctgaagctggacgaagaaattagtcttgagatgaacatgacagagtcggtttccctgcacctactctattttacccactaacaaccttttagggatatcctgaaaggccagtacaaggacaggttgcaggcgcactatgaagagccaatccaccaagtcgtcaccaaggtcttccgtggcttatctggaaagaaggtcattatgccttccaaggatttctccaggtcagtaactgccagcttatatttgcaacacccccgaagcccgtcgctaacattcccatagccaccacggtcaccaaggcgttaagtgctcaatcaaggccaacgagggtctactgtatttcctggataagagtttgatgttcgttcctaagcccgcgacctacattcagatggagaacatcgcgattgtcacaatgtcacgtgtcggaggcgctgtttctgccagccgaactttcgacatcactgtgagcctgaaggggggcttaggtgagcaccaatttagcaacatcaaccggtaagtacccgacattttcctgtttcctggaatattctgacatgaacagcgaggagcaaaaatccctcgaggactttttcaaggccaagaacatccgcatcaagaacgagatggcagaagaggtatgtgaatcctgtttccctggtatgttgttaccgctgctaattatttcctaggctgctggacttatcgctgctgctcttgataatgatgccatgggctccagcgacgatgaagtacgacccgaccgcggatcagcagatgaggatgagtcgtcagttgacgaagactttgctggttcttcagaatctgatgtggccgaggaatttgactcggatcacgagagtagtggtgatagcgatgaagagatgggcgatgcctccgatggaggagacgacaaaccggaggatgagcgaccgaagaagaagacgaagacagctaattagatgtacggctaggtttttcgttttctttcaaaatatccaagtctcttctagtaatacaccattctataactataggatgttactccgtatgttcctgactagtggacctcacgtgagctggtgattggcggaccaattctggggcttgttaacccctgatctcaggagaagagatatctggcaagtacacaagtaagtatacatgtacatttatgtgagtggattctgagcagtcctcgccaatagaaatctccccttgctagtcagaaatagaaatgcagtccgattgcttagaactaaagtgcagttacgagcaatttgcgggtttctacaatgtaccgaagtaaacagagtagaaaagacccgaaatatagatcaaataggagcaattcaagcagataaatagaagaaagataaaaaaataatccaatatatgagagataccagtccaaagccagaatggtaagaattgtatacttatcgaacacatcaggtgtttctacgcgggtcgatccaagccaactccagaatagctgggctccccccgacaacctctcccccctttctttcccagactggcagagtcaacctccttctctccatcctccttgttcatctttcgcttcatttcttccttctcctcttcttttcttttcctcgtctctcgcttctggtcaatttactccaaccccccccccccttttnnnnnnnnnnnnnnnnnnnnnnnnnnnnnnnnnnnnnnnnnnnnnnnnnnnnnnnnnnnnnnnnnnnnnnnnnnnnnnnnnnnnnnnnnnnnnnnnnnnnnnnnnnnnnnnnnnnnnnnnnnnnnnnnnnnnnnnnnnnnnnnnnnnnnnnnnnnnnnnnnnnnnnnnnnnnnnnnnnnnnnnnnnnnnnnnnnnnnnnnnnnnnnnnnnnnnnnnnnnnnnnnnnnnnnnnnnnnnnnnnnnnnnnnnnnnnnnnnnnnnccacccccccccccccctttttttttggaaacaattccaggtacattccctctgctccccgattttttttcccctatcgcgacaattcgaccccactgaagattaggagaggtgactgacgacatttatcatctaggggatcttaattcagttttacatatcctaaatccccggctttcgcaatgtgtaagctatcccacccgtgatgagacagataatctcgaggctcttccaagacaagatactgataggtctttgaagcttcgccacctgcgagcagctcccccgtcgcgtctcccgtcgcatcgagggactctcctactcccaacaacggcacggagtcgcctttcgtcgagcgcagcaaccctatgggctctggtatcgcccagaccgtcagctcccgcgatcccaaggccgcagctcaggccgccaccgacatgaagaacgtggtccgccgcaagctgactggctacgtcggtttcgccaacctgcccaaccagtggcatcgcaagagtgtccgtaaaggcttcaacttcaatgtcatggttgtcggtaagttggacagataatatttccatggaccaagctcatatccatcaggtgaatctggtctcggaaagtccaccctcgtgaacaccctgttcaacacctcgctctaccccccgaaggagcggaccggtcctaatgccgatatcatccccaagaccgtgtctatccaatcgaccagcgccgacattgaagagaatggtgtgcgtctccgcctgagtgtgattgatacccccggattcggtgactttgtcaacaacgatgactcctggcgcccgattgtcgagaacatcgagcagcgatacgacacctacctggaggccgagaacaaggtcaaccgcagtaacattgtcgacaaccgcatccatgcgtgtgtctacttcatccagcctactggccactccctgaagcctctggatatcgaggtgatgcgccgcctgcacaccaaggtcaacttaatccccgtcattgccaaggccgataccttgaccgacgatgaggttgcccttttcaagcagcgtgtaagtttttgggattccctttctgaatcgattgaagctgtgcatactgactcttctagatccttgccgatatcgaacaacactccctccagatcttcgaaggcccccgctacgagcttgacgacgaggagaccattgctgagaaccaggagatcatgtccaaggttccctttgctgttgttggtgccaactccgaggtcaccactgctgacggtcgtcgtgttcgtggccgtagctacccctggggtatcatcgaggtcgacaacgaggagcactgtgactttgtcaagctgcgccagatgctgatccgtacccacatggaagaactcaaggagcacacgaacaacttcttgtacgagaactaccggtccgagaagctcacccttatgggtgttgcccaggaccccagcgtcttcaaggaggtcaaccctgccgtcaagcaggaggaggagcgtgccctgcacgagcagaagctggccaagatggaagccgaaatgaagatggtcttccagcagaaggtcgccgaaaaagaaagcaagctcaaacagagcgaagacgaactctatgcccgacatcgcgagatgaaggatcagctagatcgccagcgtggagaactcgaggagaagaagggtcgcctcgagactggacgtcccgtcgaagagaagggcaagcgaaagggcttctctcttcgctaatgtccatgtccctgccattgcttttgcttctgcctatacttttggcaactgatcctactctcgttccattttttcccttacacttgtcacccatcacactcccttaccatcccataacgcaactgcttactctggatgggtccacgcaccgaaaaaagaatgggggtttttcttcttaccgattgattgataatacgatcctgcgagggtcagcctgggacctttcacttcttgtgatgtactttttgctacgccatatcttgtcttgccgcttttctgtgtgccctattacccgctcatttcattattttcttagtgtttgggacatttggttgttcgccgcctgtccgtgtgttagtcaattcagcgcttttagctttagattttgcagttcgagtaaacagtaagcagcaacagtatcaagctaactaattaagaaggggaagagaatcggaaaataatctcaaggggtaagatgattctcctaataagattccttccgtttcctgagtttatattagttaggcccaagcagtaagcatacaatatattcaacctgaaatctcccagacctaggtgtcagatctggatgaaacaagtacaacattaataccttttctatcaagtataacatccttcaaagtccctacctctgttatgacccaaaatatatacctatggacctacaacctatatactacacctcctagtatagattatacagacatatcaactatgtcaattatgtcatctaatggaccgcaacggaactaatcatctagaacgtactccgtatgccccagaggcatgcgtagatcgtggagtctaattctatatttaagcgaaacaacacggggctctggagcatttctgcgacaaaacattgggacccgcttggtgatttagctcaacattgtacatagtattctaagactatattaatccatatcgaggtacctatacaatatagacgagtacattgtagataggtatggaaagaattgacattagggaatactttggtatcaaaagggacttcaaggggatgtgacttcacagacaataagggcagtgctaaatactatgtattttgtatgtatactccgtacatgatcgtcattaccggcaaattagtcgtacgacggagattccccttgcccttataattgtgaacagactattatacgcataaacctgaggatgtattggacctacaatcgaagcctcaattgcagccgttccctttccatcagtacttaatactattcttgtcaacaacatcaggacctttgatatcacacatccactgtctatagggctccactatttaaacgggaggctggcaatcgccctcctcattggttgttcgtgagctgtgaggtgcattagcgtggtggtccttgtatttttaatttgggaggtgtatggaggtgtaatttgaagtatcgccgtttcaatttcgaaaacaagctgggccttcccctgggttcccttcaccttcatattcagtcattcgttgttattcaaatgcagtgaggcttcagtctcgagcatgattcattcatttacattcctttgcttttaagctcttttttcccatgccacattccttatcaattttcttttctccacgcgttgcggcctgacggcctccctgaattccttagactgcacaaccctgtctagtcttcccacactcgcttcagccatttcagccatttcaactggccaactacactcctattgcccgtcgtcgctcccactacaatgaggatctcttcattgtttgggcccgcgacggccggctggccctcgctcctcgcgcttttaccgactctcaacgccctgtcattcgagtcagtctccatcccggaactggacctcagctcgctgggacgggtatcaatcactggtgatttcgatggcgtttctctctatcaatataaggaacagaccgaatcgattcccgatggcacccaaggtcttctgaccccgctaccgaacggcattctcacgaatctctcgtccaccaatgcgcatatcatggcaatgtgcccctttaccaaaaaggatggatctttcgcaggtatatttgttgggggtaacttcaccagcctaggcggagtagactcgcccggtgctgctctcttcgacccgaataccagcaaagttactgccttaccgggcctttcgggctcggtagcggccgtgacttgcgatcaggacactaaccgcgtctacattggaggaaaattcacccacgacaacacgacgaacgccatcgcgtgggcgcccgacaatggctggactaacctcccgttcaatggcctgaatggccctgtcagctcgattttgaaagctgacaacggccatatcatctttggaggatcattcgatgccctgggaaacagcacgagcaacagcacccgcaacagcaccagctcctcaaacgaaagacaaatcctcaaccttcaaaatgcgaccgtcacatccgatgcagactcttccttggacggctactccgatcctcgtaacatcatttgctcgacaaccggggtggcggccaaaggcaagacctatcttctacacgactatgcgccgggattttggagagcagacctcgggttcgacttttttccgactaaaattcgcctgtacaacactcacttagatggacgcggcaccaaggactttttacttcgagcgctccccgacactggcatcatgaatctgacttacatcgacgagtcaggaaaaaagaccagctgtgactcgtcctgcccgctttccagcagcacgaatgaaacctaccgtgaatttaccatggtcaatcccgttggtatgcgaggattccagattgaggtgcttagttggtacggacaaggagctggcctgaacggcattgaggtcttccaggaccaaatcctcacatacgctgtcgatcaatacaatgaaccaacatgctcaggcattgaataccccgccaagtcaacgcgcaccggctcttggactgtcgagtctgggtatgtgtctgcgaaggtgaccaactctaatgcctcgaccacatccgtcacatttgagcctgacgtgaaagagtctggcaactataccatcaagttatatactcccggctgtacccaggacaactcttgcagctcacggggtattgttaatgtcacggctacactcacgaatggatctgactctagccagcccgatccgtcatatttttaccagaccaacctacacgacaagtatgacacattctacactgggtatgttgatgccaacagtgactccttccgaccaaaggttacggtgcgggccaaggacggccaaggagatatcaccattgtggcgtctcgtgtccgttttgaactactttccagcaataagagcaccaaaagcaccaagagcactaagagcaccgggggtctcaatggattatacgattatgatccgaccgcaaacactactgaaacctcaaatcttacaaagtccgacattaacaaggcggggacttcactcgaccataacgcaaccatctcaataatgaaggagcatgatgatgtgatctatgtcgctggcaacttctctgacagcaagatccaccacgtcatgtcgatcacggatggcaatgtcacagcaatgcccggctctggtttgaactctccagtactagcaatggccacccttgacaatttcctgtatgttggaggtcgcttcaccgatacctcagacgcaggttcaacgggccttcaacacgttgcggcatactcatactcttccaaagaatggtcggccctgggagcagggctgaacggtcctgtcaattcgatttggcctgttggattgaatgcatcaactgctatcaatgaaaccatccttgctgtgagcggcgactttgaccagatcattgctttcaacgggaatcccgcggtatctgttgctgggttcgccatatgggtcccctcccgtaaggactggctccagaaccttaatgttacacagatgcagttcggtggtcaactctcaagtgtcgcttcgcacaacaatacgctcatcttggcaggtgaccttgccaccaatggtatcatcgctggtggtgcggtgtcactgctaaatcccgatgatttgcaactgattcctctgtcgatgaagatcaaccacaaaaattcaagcactggtctgatcaccggtgcttatgataccagttcgaaccgcaatctcacgatctacggtggacatttcgctgccgctggcagcaatggatcaaccattgaaaatattgccatcctcaacggcaccgatgagaagatatcaggtctgccgcaaggcgtcgacagtaactcaacgtttatttcaatgcttgtgtacaacgacaccctctatgcaggtggaaatgttaccggaaacatcggtcgcaccagtctgcggggtcttgtggtttacgacctggaaaagaaagagttcgcacagactcagtcggctttctcgggctggaatgtctcagtcaatgctgtcgtcaatcgaccggattcatctgatatctactttggaggaaacttcgaaggtgtagggcagttcccatgtaattctgtctgctatgtggatgccaccaccggggaatgggatcaacctggctcgtccctaagtggtaccgtgattgaccttcactgggccagtcaaaagacgctgatggctgtgggcgaccttcaggtcggtggtaacaagacctcaattgctctctacaacgcgaaatccgaaacatggtcctctttctctggagcatccgagtcagatttgcccggaaatgtcactacgtttactgctgctagctcggatttgtcaaagttctggatcggaggtactgcggccaatggctcggccttcttcttgagctacgatggttccgagttcctatcccccggtaaccttttctccgagggcacggtcattcgtggtttagagattctccctgtcagccacgaccattctgcggctgctctgttgaataacgatcagactttgttgatcatgggttcgcttgtgatcccgaacttcggacatgcatcagcggcgctctacaacggaaccgatatcactccatttatcctttcccagcaagccgatggccgaccgggcagcatgtcgaagttcttatccgagaacaaaaacccttacactaccaccagtgagtttacttcacctttcgttcttgacaggaatcaatactgactttgacaacctagcaaaacatcactccaatggcatcgcagtcttggtggctttctgctgtgctctgggctgcgtcttcctcatcgtcctagccggtgtcatccttaataaggtacagcgccgccgccagggctacgcagctgcccctcaaaccttcggcaccgatcgaccatccgacatgcagcgcctgccgcctgagtatctcttcaactcgctgcaccatcccaaccctggtgccccggtcctttaatgccccttttcgctccaaaacccttgaccttcgaggccggcgtttcgtttcgtttttgttctgttctgttcttttctgttttgtttcgttttatcttaagcaacgttgctatacccaaccgtctttaatgtctgtgtttgttttcgcgccggccatatcgcgatttatcttcaaattcttttatttcctggctcctggcacatgtggccgatacagtttatcaaagctcctttgtgaatatgtctgtgttgatgtaccatatgctttccagcgatttatatcttacttgagtggatgtgtgttgctagggaggttggagatgtgtagatagccacgcttcgttcgtggacacgacaattaatacaatacccctttgctgatggaaatattctcaatagacatgtaactatagttattactatgctatgctaggtagcaatgtctaattatatccaaacgcataggcccattctcctttaatctacacctgagcacctgacttcgggagcacagcctgtctgagtcaggttatttgtgtgggggccccaggtcacctgttccctccccgcaggttgatctccaggttttcgtttccccaacccgatcactttctttatttcgcatgttgctaccgcatcgccttcatgtaatatcggtatgcgatcacgaaccggctggtaagtgcatatccaactagcgtgatacatggctaacacaacctagcttaacgtgtcgaacacgaaagcttaaatgtaggaatcggttctcccggccgtttcattgtctggtgactaaattaatttataggtgatgaagaaaagcccgaatgttcacaatgtcgcaaaggtggccgagaatgtcgcccgagcgaaggagtggttttccgccatcaacagaacgcctcgatgaaccggaactccccagacggtcggggtagtctcaacgggttctattcatataagaacacctttgacaaggatagcgtttggctggatgttcccaaacatggtacggcaccaatgggacatgttgtttgggtctggaccctttttggacggtagctcatatcctctgcagtgatctttgtcgacaactccgatccatacgccgacgacctcgaggcctcattactagacccgggcagcgcagcgcaaacaaactctccgaatcacagatgggacagtggaggccctcgagcgagcgatgccgagacacaggggttggaagccttgtcggcggtcgcaacacacgatcgcttcccttattctcccttggaccattcgatctctgatagtacctcctatacctccccaaacccgcagcggagtgctgctatcaccccggcttcaccctcaatatcgctgtcgtccaccagcaataataccaacattaatttcctcctcaaccccgcgcattcgatgtccccatccatcgacccaagtatgcagctatctgaccggaacaatgcgcttccatcaagaccggcagcttcacaaagaagcatgagccacatgagtcacatgagccttgtcaatcacacaacagacgacaattcagagaccgatttcgagaccgctttccttctgcggcattactcagaaggaccgggactgtggtatgtttccttccagctgttaacgtggaaccatcagtaataatgatatctgcaggatggatctctttgacctagggacatatttcgcttcatacgtcccagtgcgagcacgaaccaacccgctcttgaaattcgccgcctgtgcatattccgccaaacagctaggccgagtcaaaggtgccaaggcatcggtgggcggagtctgcacccagcagtctgccatggaactgtggcctgacaaagaccccgacttcgcatggtatggggccaaatattatgaaaaggccatccagctgctaatgaaagagctgcaacctgacgcagagggtccacctcctttgagcacccctgaagctttcggtcaatggcaggctgccgagatttctgtagattcggataacccacgtaagcgccgcagacgggtttctgatagtcggctctcgcatggggttcattccgacgaggtgctcgcggcgacggccattctgtctgtttatgagttccttgatgccgcaggccccgcgtggaatcgtcatttgagtggcgtgaagtcgttgcttgatgtcgctgaagtgggcatgatgcctcttgagcagcgtccgtctccgggagagagctcatatcagacgcagacgcctaagaagtcgggtctttccaaggctcggaaggcaacgttttggaattttgcgcggcaggactacttagctgcctgtgagtgttgtctgtcgcttcccctcccctccaaacttcgctgacagaaaaaaagtcatcaacgaatgccatacacggctcaacacagacgatacagtcctctggaccgaagcagggttacttctcgacaacgcgggctttgtacgcgctagcaacacaagcgcagcaggatatccggaaggtgaagatgtaatgaaagaagacctaatcagcaacggactagtgtggatattgtccaagatagtcaatttcataagctctggcgacaacctgcacataagcggatccgtgccaggacccttgggcgtctcgcaacaagccctcctggagcggtggtacaggcttgaatccgagctcgacgcatggtacaccgggatcccagagacattccggccctgcgcccgaatcgacgcatccaatctcacacaccaccggccgcccgacgaacacgaagacatctccaccctccaggaaatctggtacagccttcccatgtgcgcctccgccatgcagcattaccacatggcgcgcatcctgcttctcatcaacaagccgcacgagtccactagccggcgcagcaccataacgctccgtctccagtcataccgctccatcgagtctgagatcgcattccacagccgtgagatcgtgggtatcggtctttctcgcccggatggaagcgtcaggatcaactcgctgcagccgctatttgttagcgggcagtgcctgacggacccgcgtgagcgccgcactaccgtgcgtctgctgaggagtattgagtcggatttaggctgggcgactgagtaccgtgtgcagcaattgctgaaggagtgggggtgggatgagaattcgacccgctcgcctggttcttcttgttcttgagacttgaagacaagacaaggtctccagcctaggaactagacatagtgtccgggttgaggtttggcgcgggctcaaccacgttcattgtatagtacccagtccctcttggtcggtcctgtattggagccgatgaaatcatccgagggtactggagtgaagtggtatttgcagatatctcggcttatgtcgaattgtggccatgcattccaatcttgtcaccaccacatgccatgctgagaatgacttgtcaaacgacaagcgactgggaattcccgtcactcattaggggatgtgccctctcacgtggtgtgacgaatgccagagacacgagtaatgattgtttatgatacccgtgtacctctgatagtaatcatagtatagtacaggtgactctcacactgcaacataggcagtatagccatagagtggacagatggattctaaagaaaaagaaaaccagaaatctcgttagatttagggtcgagagcctttccttgtttgattctgcaagttcggtttagttgcctttggaagacactaaacgtggtatacatattatcataacccaggcgtgttcatttgagattatatactctatattacttacatgattgttctctagctctaactaatctaattacgaaaaaaaaataaacacccattaacttactatttaactaacaccccaatctccaacaccaaccataaacccatccagccctaatccaaaccccaacctcaacgctgcaggttttccgttgaccatggtgtcaccgaatccacttccccccaccgatttacccttcttaggttccgggggggcaacttatccgaaccaggacaccccagatccgacattattcaggatctactccgtacgtgcaggaatatatcgggttactagtatcggctattccgtgcataattcatgatgggtaggattctggggattgggtcggaatacaacatacaacatacaacttagagactagagaatggaaagttgagcgttgcagaatggggtagaaagaggtatttatagcggatttatgttggtcgctgtgggcgagttggagatttagttgagacattttgtaagcttgaatattacgagcttacttggacttgggtttgcggtgagcccagacttcatctattatttagaatttcgagcgctgcggtagcaatgtaagcgcaaattcaacagagataaatttgagcttgtatgtttgatttttgtcaagtggttgggtggtttacttctacttatttaggttgggaagaatacgaagtgggggatcaggagatatttcttcttgctttggttaatggtagcaatcacctagcctctttgtatttcggcaaaatgaggataatctctagcgtgaagactattctgacctgtgggttctttttctgtcttttcttcggtttcaccacgagccagtgggtcgatgcggacgggaaaagcagcgagtcagattgagcttcgagctaggactcaactacgccaaaggccgaaatcacgtatacaaaagaaccctggtaaaaccaaggtggcaagaactacaggtggagttctgtgatttgatgtgggctatgcttgagcgaggtgttgtatatcactcataagtggatgatcgtgagaaagcgcgaaagaccaagatgcaaaggtgttttctgactggcttaacggtcgggggtccgtgaatagcgctaagtgtgatgatgacaagaggacgccggtgtgatttgagctagaaccagctactttgtccgtgcatatcatgaacgtatttccgcaggatgtagatcatagactatatatgtctagtgaaagtgaataagcctgctaatctatccttaaataagatctacaggagggtcgggatatgaacgggttagcgtgggattcgagagttttacaaagtactccgatgcatttcaatcacctcgttaagcacttcattgtgatagatcggctggctgcatacagagtacagaaatatcatgcggtggtctcttagcatccgattggactcatgtacgacgaatgccggtagtgatcacagcgggagatgcgttagtcgtaatgattgggtggattaacgcgtgggctctcggggaggaatgctattgttggtgagactgaccactctggcccctctgacccctcggtgctacatacaatagacagactttgatgtccaggggtaaaaaggcaatcgaatcaggatgaagaggggagtggttggacatgggttcttgagctcagctccgcaatttgcatagttgtgtatttcattcaacattagcattgtcttattgttttattatattagttattatatatgggatattatagctcactaagactaaataataagacgatatcccgactgttcttgtattgtcactgtattttatccccgctaaaccaccgtgccaagaccgaattgagtttgcgaggaccgtgggtcgacttggtcctaccgggtaaatgtgattgcaagggtttatgtattgtattattatagttagttactagctaaacactattagcacactgcatatggtcacatcccggctagactttgagagaacccttctagactattgctggatgcgtcgggtggaaactcctcgcgtgcgctgctgccaagggtccgggattacatgtgggattcttttattccaactttggaaggttgtagctatatagcggatttcctctgccacttcttgacgtcccctttccgttttagtgctcagaccttgccgctttttgctcagagtacaactgagcacgcccctgagcggtctgatccgctcactgagcattacataagcacccagatctgctcacgtgcagccctccatttttagatggcacccatcgtcccatcaatgtgatcttcaatcctggtaaaatgactgcaattatttgcataatggagcttgccatttggacacccaataagcactaccatgaatccatacgggatcacctcaagcagaatcatagtactattattgattgcattctcccctcttcaggagtccgggtcgctgaagctgggtcatttaagtctttttcaggtagagccggtggactttcgatgatcattgagaactgacgtatattcaaggtgacgtgatcatgtcttgcaagtgcaagtggaaatgtatgtatagtatacgtacatatcaaaacccaccctctgcgtccagtcaccacatcgaggccgttttcctctgccgttgaagtttgagtttgagtgaagaattttcctccgcaattttcttaagtacagcaatggttatatctggtatatctgtcataatcaccatactttcatcgtaggcgaggaactcctgcgcatcgcatgagattgacttaattatggcgtctcgaatctcgctctcaagaggcggaatggtgatccagatttgttgcacaatcaatggaaatccccttgcgttttcggagatccaattcataattcgagatctcgcaaggattttcagtcgcgaaatgtcaaacttgtcggccgccatgaacactccgaggttgttccacatagctgcatgaggttccataccattaccagaagcgcacttccgattttgaaagtacgagccatctgtgtcttcgtagtcttggtggtatagaaaagagacaacccgttgaatagttgcaagctcatcatctggcagatcaacatgtgatagcgaggcttccttgtaaaaaagttagccatatgcagcgatcacggcaaaggcttgtcgcattactctgaatcctcctttgactgcagcgtcaaaaaagggtgattgtgaacagactatcgcacgatgtacctggaacttctgtccttcgcatgatatcgccaggtctgagtatctacctgaatccagaaggctttgcaagattggttggagatctggaaaccccatgattgatgtagctacatgtaggccaagttcaactcgattctagcatatatcaattctactctatcattgaagactatgacgtcaacactaagatcgtttgctgaggagtgggtcatcctgaaattagcttgaacacacttgatcatctctagacccaccgctaagatctatcattgagggtcggtctcagaaagtcagaaggacgcaccatgtatagctctgtatcttactacatcgtgttaggtccccgccgttaagctctatttgttgaatgtaccgtacgagcggcacattacgatatctctcaagttaatgcgtgtttacggcggcttttaactggaccaaggggtgcacagacaccggcggtctgatagagcaattttgttcagttataaaggtgcaactgattgggttgtgcgtcttactttctacatctgccttttcagaaagtaatttgcctttctccctcgaatcactacgatgtgagtgattatttgctgttggcatatctcaacaattgacactgcatagtgcgttccagaatgccgactctgccaatcgttaacatggaactgcagtttctggagatgagagagacctacgaagactcaggttgtgggttccagttcgcagggactctcgttgtgtatcaggtgcagggccttttgtaccatgcaaagctgaaaggccgttgctcttctccttcgattgtcaatgcagaggaccttatgaacgttaagcaaattcctgcgtcggcctacgatcccaaatttcctgtcggatttacgctatcgcctggatccctacctaacggttgtcatgtcaaaaaaccccgattgatcaattgcgatcggattagtgaaggacctcaaccgaatttgattgcagaagatatcctcagggaagcaaggatttacgaactcttaacgttacacccacatcctaacattgctacctacctcggttgccaagtttctgacggcacaatcacgggactttgccttaagaaataccctcataccttgatgaaagaagtcaacccgggcgctctcaaaaagagagcacttagaaacatgcggaaagcgaagggggaatacagtcatttcctcacgggcattgaaaatggcatccagcaccttcactcgttggggttggttcataacgatatcaatccaagcaacataatgatcgatgaggatagagcaatcatcatcgattttggatcttgccggaagctaggagagagcttagaaaatgtgggccgtacctacgaatggtgcgatgacaaagttagaagtctcttctagagaatgacttgaacgccttggaagaaattcgcatttggcttggcgttagttcacaagaattccaatttgatgaatagttcaattcatttgaaaatctgagccattcttcggatccaatggggaggtctcgatcaatatgcctggctgttgagaaggctgctaaagatactatctttccggccagcaagtttcccgggcccatccatctctatcacctttccctgatctagaacgaggactaaatcatgatccatgagcgtatggacacggtgtgccacagtaagagccgtgcatgaatgaaacggctcgcgtcgcagaagagcctgaacatgagcgtccgtttccatgtcgacaccgctagttgcttcatcgatcagcaggatcttggcgttgctcgcctgtatcttcagtattgcacgggcaagctccagcaattgttgttggcctctcgatagagataaagtattagttatctcagcttccagtccacccctgtcatccaacacgcccttccaaatccctactcggtctagggccgcgatgatatctgcatcggggaactttcctgtggggtctgtgttcaacctgactgtacagcccaccataatgaatggatcctgaggaatggtgacgatcctttctctgaccctttcaggttggagggtggcaagatcgacgttgtcgatcagaattgatccattcgtgatagtgagtatgcccaaaattgcggataatagggagctctttccactaatttctcatgacggaagggtcaggccagatcctcaatatttcaccgggtagattacgcagagctgaaacttacctcccagtgcgcccacaaatgccgatcttctgaccaggagaggccacgagagagacactcttcaaagcaatagctttcggactgttcaatctcagtttagtgacctgggtgaaatatactcatttgtctgtgaagttcttactggtactgtgcactaacttccgagacgtgaattgcgccccgatctggccaatcgctaggtggttccgtttttccgcttgtgacttcgctgggaacctccatttcaaaatctttgactcgtgagattgaaccaagtgatatctcaagttgtgtccagcccgatattaaagatgagagacttccgttgaatgctaacgatgtttagtcagacaggcaaagacgataggttgaagcatttgatagaagaatgaagagaatggagaacagtttcatggtcagacatgacttacagaggatgctgtttagtgaaactccgagtaatcccacactagtcttctgcctcaaaaataccgctaggctaacgacaataatcgcttctgcggcaacaatcagatccaggaccagattcagccaacgttggatgcaatttagcatatagtatgtgcgttgggtgacatctaatagtcttgagttcttgttctggaagtcttcttcccacccaaatgcttgaattgtagcaaggccctcgactgtatcaaggaaatgagagtacagtgggcttctgctttcgaggtccagaagtcggagctgtcgtgatgtttttagataaacatgctgtagcaaaaagacagcaaatatcaagaaagggagggagatagccatgtattccgatcccgtagcaatgagtgcagcgctagcaattgatgagaaaagatctttaatcataagcatgcatatctctaaagttaaaggtgcccatgataatcgatagatctcatagcgagatcaaggtagggatgggacaagtcgtgaaagatttagggaagcgagacttacttgaaactgtgatcaacacgccgataggcaattgactttctacgagggtcatgtcttggctgaatcggttcaatattgacccattgtcaactgttgaaaggaactgcggtgtcgcccttcagagatcatcagcagacgaagacccgaaaagatagaatcatcatacctaataacggtcctcagcacgacatagtgaaggcggcgtgccgttgcgggcgaaattaggatcaagatagcccttttaagtcgtaagcaattggttgtttatgactgggctctatggagacctcttaacataccaaacgtagccaccattcccgatagtgttgcaaatcgcgaggaggaagtatattgtgacatataacggcttttgacctccgccgcggttagcccaccgctcaagccagatctctatgtgcaaagcaatgtcagtggacatgcaaggagtagtggaatatgaagtttcacgtactgccgtatgtactggcgaagacattgatagtcacgaaggaaacaaaaatcatggccttcgtccagccgatgtagcgcaaatagtacctataaacagccgagtctcccgttgctcttctgagattattaatatcattcgctttagagatctcggctgctttctctttcatcatcgactttgtactttcctccaagccctcatctgctgcagcatcgggtagcagagcttagtagacggttctctcgcgggcctcttcccggcgaagattcccgtccgaaagagccagaacttgatccgtataagatagataatcaactgtcgagtggtcagtgcacaacactagggatttgcggcatcggggctgttaaagggagccctactctcatgagtcaccattataacggtcgacattgttcttcgcagaagtccgttacctccgaagagacgctctattatgatggcctttgttttccggtctagtgcactgagtatatcatctaataacaaaagtttcctacgggtatacacagcccgtgtaagggcaattcgatgcatttgaccgccgctgaacttattcccggatctattgccgatttgcgtggtatcaccctcaggaaacaattccaggtctggaagcagagcatatgtatgaagaacgtccgcataccattcacagtcaataccgtgagtggttactgatcctgtagcagttaccccgcaaattgcttctcggatggtgcccctcgggatccaggggatttgcgcgcaaagggtcgggtttttgatttttactgtagttacccctttctcgcaaactgcttggctaagtatagcccgaagcagagttgttttcccggatcccactggtccccgaatgattactagatttccagctggaacttggatgctgatatcccgcagtactatctttgccgatggaactgggcggatattgactcgttccatagatatgacggggaatgtaggatcagcagtgccgctgctcaagaatgatatgggttgcagctcaccagagctatcgctcatgtgaatgtgagtttcttccgtggtaatagaagttgtatctgggtgatgctgaccagtcggcaccatgagaaatgattggattctatcaaagcatcccgtagcggccgccgtggaaggaaccgcactaagcagcttagaggccgggctagtgagaagtgttataattgacagactgctgagggtcttgctaatatcaagttcctttccttgagcagcgtagactgtgaaggtcaaagctggtgctaatgcccatggtagattctggatcatgttttgctaaacgatgctccatcgatatttggccatttgatgagtttcttggactcgtttgttctgtatgatatgaagaaaggtcttactcaaccctatccgcttaacagtttggatatcagccagcattgaacgggtgattgcgatgcgctgctgaacagtatcaacccaatttttctgctgcccactaatattcttcgagatatatgtgctccctaggctagatactatgcaaaattatcagcaaccggtagcgtgatgtgaagtgattgggatacccacggattacgataatcaatggcatcagacaaacccatcccatacgaagagcaagcagcgaaatgccaatcgcgacctcaatagtacgagcccagcattcattcaaagtcactaggcaatcgataatccggtcaatatcggtggtcatgagagtaattgtggccgaacgatcctctagtgccccatcggggatgcgcaacgcatggttatagatcatcgacgaagcggcccctcggaaaattgtcgtgaaccgatttagcatgtggttatacgacagtgtagaaagagccatgcctaggtatataagaatagtggcgccgataagaccgtagccgtcgttcaacgcggtagatggatcatcaagccagttaagcatggaagtgatcaggaagggttgcgcaaaagtaaatcctatcaaacacagtcgaggaaataccactagtgctagtgaggccctgagagcccgatatatctgcactgggaattcgaagcggtgtgccgggtgctggcgttggatctaagcttgccgcgccttctcggccgcgcccgcagattccagaggcttatccagaacatccagatcccccacagtgagcaaagatcgaaaaccagtatggaaaagacggttcaactaccacagaaaggaccggttcaagataccactcgttgactctggtggcagatcacgatacgtaccagtgaggtacttctgcttccctagactctccagaagaagcatcgtcatctttgcagtaacactagctgtaaatagactgggaatgagacttctagtgcgggataaccagagagttctggtctgcacaatgtcgaagagtagcgtgaggataagatagatggtgaggagtgatgacggcctgactgatcgctcatcctccatctacgatatgactaaaatctccaatgccactgcaagattgatcgcgccagatgccacggagatatatgtaaaaggcttagcattctgtgcccagctaatgagtagggtgagttagattgcggcaaacacgacgatagttatctgtgctatgatatgagttggacctccaaggtaaaggtgtggaagttctcaccagttttgcagatctcaatttgttaaactggattcggacatcgcatttcgcgagaatatgtagtcgaacaggagaaatgatgagaaacgcgaccgcagggacgaggccgaatatcgcttgctcgaacagaagggtgaaatcaaagccatcgcgatacctaggattcgtcacggggccgaaactattgtccgcctcaagcgggcaccctaaaggtatcatgctgtgtctatctctctaaatcgcatgaaaaaggagagggaaagatgagaagttgacttttgaatgagctagtaagctcctgccgcgtgatcgagggccttatcagatatgtttctccgtactctgtacatacggcgaaaatgatttaattggctgggtactttggtttaatttgttttgttttcgcagatctccaaggctattcaaaatattggtttcgaaaactacgtaaactaaaagatggccgacgtaaccaactatagaatctcatgccttgaaagttgacaccttcgtttgaaatcagtgtcagcttggcatgcctgtaatttatctctttttgcatcaaaggacgggctacggcttcttcggcgatacccgtttatgctgcagatcgacgctacttacaagacgtgttctactaaacagataaattaaaggcatgccaaatttacaatttttcttcctccgccggaagggtctcattgccgcggtagaaatgccagtccattctctgcaggaacttggtgactaggtcagcgaggtagcattcagggcgctgccaggcccacggcatggaatcgaaaatgcctctctgatggatctgctacagctaccgaactcatccccagtcgctggactcgaaggaggacgtgaacttcccgtttccaacttctctcgcatggctgcaatttcgtcacttgccctgcgagtgatacctccgacggacgagagcgtagcaaagttgatgcttccaagtatgaatgagagaatattaaatagaaataggacgccagtgcggacgaggaagcggttttggagccgggtccccatcgatccgtccttcgtctcgttccgggcatttatcgtccacgccatttaaaaggggtcatattgatccaggctgtcattcccaatgctcgagaatgctgctcctgaaaaatgacaggctttggcagtccctcgttgttcaaaatttccgatgtagtttggtaccgagcatttttgtgtagtcggatgagaagaaaaccttaaagactggagcacaagaaaagtacgaggggcgagctcagctcccgaggggaagacaacacagatgtctcaactatccacgcatagtctgtgacccaagatgggaccgggtatccgtatacagaaatcggatgggtcgcgatgaaatcaacgaggctattggccagcctcctatcgaaataagaagcttgttcttattaccgcttccccactattgcttatgttccagcactgctcgcttaaattcgagagcctagagccctacaccggagtccccacgggcgtccgttgatagcccggccccacacatacgatccctgcctgatactacctaggttaatggattatatatatttttcgtaggtatcttaccctactaagcccttgtatcaaaggtcttattgctataaaacccaactttataaagattataaaggataaaatacttatagagttaagtttagtgttaacttattagggatcgtgtaacttcccggggaaccgtgtggggccgggctatcaaccgacgcccgtggggactccggtgtagggctctaggctcaagcgtgcagtgctggaacataagcaatagtgggaaagcggtaataagaagaagcttcttatttcgataggaggctggccaatagcttcgttgattctggcacacctttccaagggttccaagtcactccactgaaagctttcaatcggttgaaaaaagtaactaatgttgtgatgagtggctttattgtatttgatcgtcaacatatatgcaaaacacttctcattattcattgtatagagggaaaattgagaggtttcagtacgctatctgttttacctcgcccgctatcaagtacaggagtgggtccaaacaaactcaaaattatgggacttacatgaaatcgatgggccagcgagggcgggactaggcagctggaactatcggaaagtttccatgggggatctcttgttgcctaacatgcttagctacttctgtaatgagtgagcatgatgtgtacgtgtcccttttgaagtagaactcgggcgtactgttctatggagtacatccttgcgctccctgtcaggctaaaccaccaatttatctttacgcgattcccgcagttacggcattatttcatcataatacggagtacaatatttctattttctataatccattatccggacttcccaccagaaagtaatatcggacatgagattgagtccttccggccccgtcgtgaagtactaccccaatgcgggatcagttgacaacggctattcagctccttttgtgagaaataatcctcgtagactgagaaaggcattctttctgattcgagctatacatcttagatctttattaaagcgtggcacatggattgattatgtacctagtatgtagctaggaatataaggataccaagataattatattgtcactttgttctcaaatgatgttgtctatatacgataatagatacaaatagtgggcgaacaaaatatacaaacaaatgaataccctccctatctcccgtagcttgacaagacttcacgccacgccaccatttccttaactgtagactaatggtttctgaatgttcctaggccttgtcgacatatcaagcggcaatgtcatgatcctgggctttatgataaccatgaacctccatgaactccctgactgcggtctaaacagtatctcagcattctataaattagagtatggccatgtgcatctgcagcagacttaccttgcttgtgcaaatatgagggatgcccttcccgtctacttggtatcgtcttctatcttcctctgttcttggccactccacggtcatatcggcaggacattcgaatgcttgcctcagatagtcaaaacagtggccggtgtgctcattttgaatttgtttattcgcttgatccctcgtcgtcgcaggatcatccacctttttgttttcacggtttataccacaatatttttccttctataggataactcacctctaatatgtctagcgacaaagggccatgagtttctccttgacacttacagtcagtatggtcccatgggtttgaaaaaatcttgctaaagagaaaatctaggtcctgcgcgggaggcactgaagtgggaaccgaggacgtttgaaaatcagcttaagatatcaaatccatttaaaggaccacccagaccagaatcagaggagggatggcacaaacttcttaatctggccgctgctattcgtgtggataaagaagtactcgaccgaattaaccggacttctgttactctccaagacggattgggctatatggttggtctggatgtctatcatcaactgcattgcctggtccgtattcacaccagtgccattaggtatatcggcttctgaatcctgtactgagaagtgaacgcacagagatatatccgcagatacctccaccgggagcactacaatatgacagaggaaaacctgggtcagtatatcggtaagccttgtcactatatccatcttaatgtgagctaataccctcgaagaccattgtttggatggcttacgatagtatatcatgtgtaacgcggatgtggttctcaacacctttgactggattcccaactttcctagaccgtggccaaacttccaggttgtgtatgagtgcgtgaactgggaggccatcgaagactggaccttggcgtacagctttaatggatttgatcctgatttaatccaacatccagatttctatcctgagctacgtaagaaatacacctaagactggagaagtggaagagacactgactgatattgatttcacttcagcgagcctattcaattacactctgagcgggaatgagccctaagatggccgggtattttgtgaaaggtataactagtccgagttagaaattgcccaaatgtatttttcccagataaattaaatgtttgagacatatctatcagccgcaagttgtattcgctcagtcgaccaggccaacacaaatccgagtcccggtaagatggtattgacagcactttgaaattcttgacagatggtaaaagcttctcattttgactgtattatttcccaatcctctaattgaaggccagtgtaaataatcttcctaagccttgcaagttcctgggggatcattgactggcgtctttaatgagagggtggggcgaagccgatatgagtccaaaagaaacagtcgaacttccttgttggcggcaatcacgtactttgtgcccaaactggccgcacgaattacatctaagaatggtccgccgccagttctgacatgtcgtaatattgttcgtctgtgactggtctatagtcgatagtcgtggtgtccgtatcttctagtatcggtgattccgggactcgttgtccgctggatgaccgtacgaataaacgtcgtataatacgtcgggttgtaataaggatctatattttccgtttgttgtgacaacagattcgctatgtctgggacgtcgtatgcgtttcctggctttcctagtctctttgctaggtctcgtcgattatgtcgttcttctacaaaaggctcctttcctgcgctttatcgtcgcttactcatcaggcgtgttctgttagttactcaagtgggtgatcaaaagtggctaggcgctctctgcaacctgttgtcggatatgaaaaatcgtgatctgttcaagttgttttcggacaaatcccgtcgcgtgcgcacatacaaacaactaatgtgtcgtaatgcattagcggaattccccaaaatccttctgcagactaagaaaatgtctcagaagaagagtcaatagcctagaaacagcctagatacatgtagaatccctctcggtttcaaccgcctcttagactccgccaagtggcaatcttcctgcatccgcaagtctggcgagtcatatacacatcaccagttgggagattaagacagatttggttaggaagccccgttggaagccgacggggagtagctagttcttgatgttgcattggcaattgcatatgatggtcgatacataatatttgtcagaaagccgatttagcagatcattaatagtcgtactagtaaacatggtaaattagatgaaattacctcggaccatgaatcctatcccctcccagtcagatacctatataaacatcataccaatcctcgaaattcgagattagagttggaaatcgtctaatacgacttcaagaaaatataccatctgatttgcttctgaagatcaaccttgaattagaatttcaacatgcgcttcacctgctttgtgttggctttgccattcctgtcaattgccgcacccatgagtggtattacctccatcctatgaattgatattttctatttcctaacgtctatgatagctggctttgaaactcgaggcttagaaggaactgaggagaatggacaccaatcctacaagagagatgttgctggcgccgaggagaacggacaccaatcctataagagagaggtctctgcggcctaagagcacccacgcgtacgtgctggcctcatcagcgaaatatgcgtcttctttactagacggccataagtataagcgggctttatgtacttcacatatgcacacattttagctcatcctttcctcgctctgtacgagtagcacagtcaggatcatctgcgtagtagctctagatatatgttatgaagcctttatgtttaggttagaactctttgtcgatgatcttgtgccgattagctttatctagcacctttagacgcctggccagaaagatgtaaatactgcagtaggggtttctagagtaagataactgagcggtcatatgatctatagttagttagctaactagtgaagagggaaatgcacgatgggtaagtatccgggccatataggtaagataagaacaatataataatactaactaactatctaggacggttagctagtaagtatagggattatatagactatactatagtatataatctcctagtatataaatatcttataacttacttcttatttctagggtaataatctagttaggctctctctttctaaaactctacttaataactagttaggcactcacttttctctgcctaaaggataaggctactaaactagggattctgactttctctactatattagttaacaaatatacttagttaccccttaactccctttatattaccttatatagttactctaacttatatctcgtctacctaagaagcgtccctttcttatcatacctctctagctatacctttatccttacatcctatggcaggaagatgggtctctctgccttattaattgggcatctgccggctactatccaaggttgtttgagttctgcgtgcagtggattactaaaggaaaggacggtaaatttaattctcttctcttggggtcgatgaatcctttgtccagtccagagatggcgcaaaaagagtccattatgtgtgcttggagaaatatccagaagtatcctttgtgagcacatgagactccagttatttattgattgaaactcacctacttccatccagtcagaccaaaaaatccaaaaagtccaaatcatgccaaagagcatcaggagaacttctccctgttccccctccttcgatgccagaatacccaccagattggcatgaacaagataggcttctatcataggtattttgacgtttcctttttgaatatgccctataaaaaccgaataaatttccatgttaacctttctttctcattctcactaatcccaccctgctaatctacatctggaaagtatatgacatgagcgaggagtagtcttaaccttggtgccctctttgagcccccaaagagaggccaatatcaaaccgccgcatatttctcgtatcaaaatcgatgatagagcaagccacaaacacattcttcagatgtcaacaaaacaagcagtctacacccatgacaatatctaaacagaaaatgtcaaacacaatgtccatctacaggccaccagcagagcaaatcttcttagactcagggacacgctcctggtaccgactcgggtacgcggagccctgtaccttctggcaaagtttgccagtattcattttcttccagccactgactttcttcatgatcttgaagaactgcgcggccgactttgcagcatccatatcagcagcgatgttggggtagtaaacagcccgctgctggaagatgcccacgctgtcgtagtcctcagccacagcatcatggtgatacttgagagaagcggggaccttcttgttggcgtaaataagaatgttagacttgaggtagtgttagcaagcttctgtgttgttatatttcaattgaatgtgtatgttaagactcacctcaacaagagcggttgaaattccagcgagacagccctgacgacccaggccctctttcttggcctctgcgatgatggcctttgcgtgcttggtctgggtggccgagagaccgggcagattgctgctggtgctgcgctcgctgagggcgccttcgctcagggtgtcttcgtcatcgacagtgtcttcgctggggcattcctcggtgacatcgctggagaagtcggaaacatagcagtcgtcgacggtttggtgccagatgtcgctgccatcgacggtagtgccggtggcctggcagacgatttcaatgtcagctctctcctcgtaggtcttgactacagagtgagaggctcctggaccagagtggcagtcgatgacgctgccagtgaccgggtaggcattgacaattggcgtgagagcgacaaatgcgagtgcaagaatgggagtgaacaccattttgaatgagctttggggttatacttgagtatattgagaagttgaagctggtattgaagaatgaagactagccgatgttgcgatcttgtgagctgatggatagaggagcttgaaggggaggcaatgagcatttcatatctctgggatcctcaatttctcgagatcgtatactacatcaatcaattactttgtacattgttgcatgcttcggacccttgtttgccagattgatcccgtgctcttgccccacgaagctcgtatagaagtggaatctagagagatcttcattgtttttttcccacaaagcccgtatccctagtcgaggttgcatcaagcgagattaatgaatctatattcaggaaggccatcccgtataaaccctatagggagttcccgtgttattcaaacgtccgatgttcgaaagcttaatcacctgtcagggcacaacgtgcacgcctaaaaatagcagggcttatacgggtactagggtcgattggtgtagatcaccgtattcaaactatgcacttcaactgattcgccagtcatgttcggggcagatttagtgcgtgctacatcggagagatgcgctgaagtatctcgtttcatctatagtatagaagtaatttccgaacgcgggaagggttcgacaaatatgggtttacccttgttttgcgacaagcctttgtagtgcatattaagcatcggctattgtaacccttatttatgtggtaattgcaactcatgtaccgggtactacgtcggtcatggggaccggactgaaggaataacgagattgggctgggtgcatgctaccaaggtctcgtaatgtatttcacaagcgagtaggccttcgagacatagcaaatacgatgaattgcaacacgatcttacaacaatggttatttagaatatactcttatggaatctaatcactatcgtgggtttcgggaaattcaacaaaatagtgggatgtatatatttctaaagtccagtgatatttgcgatactatgacaatgcagttctctgaattatttgaaattgagatatgttagttaccagaaatgtttatcaataactaaataccaacagcattggctgttgacatgtctcgtggtccagctcgctttgagatacgttatgatcttgttacttcttagctcagatcggtctaaatatagtattggaggaatccaacctctgaagagtattccaaacaaagactaaacgtcagaaagtgcatgtttgcctagcttctgcaacgtgcttcaatttataaggtgtgacaagttggcttgaccttgtcgaggatcacgagtctcaatggatactgttttggataaatgagcgagtcaagtcattgtccactatccaccctggttagtacggcgtagctgaatcaaccctaaggctgtgagagttatggctcttctacccgattctattgtcaatatttccagaagagctccgatcaagcttgatatatatatcaattctgcccaagcccctttgcattgacatttattcaccaaaatgtgtgacctatcaaaatataactaattatacatgaactattgaagaatcctggcgttagtgctaaaactggatctcctcaagcgggtcagtcacaccgactggactcgaggctgagacaaagcgagaagttcaaatgagcaaaaaataagtataataagtcgagaagtatatacaatcgaagtgaagaggctctatagatgtatagataaggaattgcatcatcccgaatccccgacgtcactacggcagaaggcggagagagagaagaggcgaagctgaggcgtgtgtgtccacggctgtgaacctgtgcacttggtctccccgctctctccccagccaccgtcttatctgtcgctttccaccttttttttgcttctgccttctccttcatctcgagtaattttatcaccctcttcatctgtggaaaaaacaagatatggctcctcctccttccgccaccttgcctctggttgagagactcaaggccttggcgcagaccctacagtacgtttctccagtccaaggctgaaatgaagcttcaatgccttgtttatccatactaacgagatgtcacgttgcaggtttgcctggttcgttgggtaggtcaatctgaagcgcacaccgacaaagatccaagttcaggcccactaacaatttttagacatgtgacacttttgctctcagtcttccgctactccctgtcttgcatcttcttcaactactactcctccgcggcacagatcgcctaccgtttgaccttcatctcggccgctgtgacttatggaatcgtcgtgtacaagggccacttcgcccgaggtgtccaaggcagccctctggcaattgtgttgaagctcatctctgatgagaatgtgcaataccttggtaagtgatcagctatgcgacagcccaaacctcaagcttacacgtattctagggatggctctggtctggctgtactcgcgccagctcatcctggctcttctgcctttcagcgtctactcggtcttccacgtcgcaacctacagccgcatgtacttaatccctaccctgcagcccgctgctccggccgcccctgcctctcccacctctcctacctccaagcccgctgtcaagcagtctcccctcgccgagaccattggacggttcatcaagcagtactacgatgctagcatgggtgttgtcgcaaccctcgagatcgccctgctgttccgacttgctctgtccgctatcactttctccaagggtagctgggtcctcttggtaatctacctgtctttcttccgcgcccgctatgcgcagagctccttcgtccagcaagctgtccgccagcttactgcccgtgccgatgccactatctcccaccagagcactcctccccaggttcgccagggctgggaggccatcaagggtattgtgcgtcagggttacgagatcaccgatattggccgctacatctctggccctaccgctgctaagaagccgcagtaaatctcgatatggtatgccagacaccttgctttgcatgctggagctcatgacatcaggaaataacatgggtttttggtttgcaatgttgctgagtcaaggtggctggtgcaaataatattacagctgtatctttcccataggcatgttcccgcctgagcaaaggacaagaaggatgtcggagtgtgggacgcccaggtcccgactgtagaaaagaaggacgcggaggattcctgccatgatgatgctatacgcaatgacttgtgtttattatttctagagtattgcgatgcatagtctgtatttgctctcctcttgtcaacataccttgtttcggattcatttcattattccaatcacggagagtcgtaaagatccgaaatctagtacaaagggtgggagggcttctaggcaggagggctgcaacggaacaagcgctcaacgtccttcaggacagtttataatcgatcaatctggtctagacaaagaagatatcagagatagacagttttcccgagatatatttgcccgaatcaaagtaggttagtgcttagttatactagactcgaggggctcttactcaaccccgctgatcatcaggtttctttcataaaatggcctagcggtaactgaaactaaagaagccccaagccctgtgaaattagctggttttactagcattggacaagctctatgcataagtttattaacaatgagcatgcaattacggagatatatagttgtgtggaggatatcaaggacaatcaagaagctcatttgcggcttgtagcagttgactattttagtcctcacacatatagaaaaaaacctctccgatcaaatatacatagttgttcatgccatatgctgtttttagatcgtatctctctcgaaatatcgaatgactccaatgacagaatcccgtgattcgtgcctgaggcgaccgacttatcgggcttggcggcgaaaagaagccgatcagaattttggctggcggaacaatcatcttgcaaacaatactaatcaatcctttcccggtctcttgtcactctttcctattatccttacctcccaggggtgctcctctcccgctcaatacctcagcccctcagcacccccatatcccagtctggtcccgaccagtaccatcgggatcccaatttagcataatattgccatgagcctgacctcgcgagtgttcggcctgttctcgacagcgacttcggactcaacagcaccgcctgcgggggactcgaatacctcgacatggacacagcagacgccagtgggtggaaccgatgattcaaccttcactgctcgaaatggcgacctcgcgctgttggaggacgaggaacctcggccgccatacttacatgtacaattgcccctagcggcatcatatcattgcccaaggactgacctgatttgaaattataggcgatgttggccggtggtaccggaggaacatgtggcgacatgttgatgcactcattagacacagtcaagactcgacaacaaggcgatccgacctttccgcctaaatacacttccatgggccagtcctattcaacaatttaccgccaagaaggattctgtcgcggattatatggaggggtaacgccggccctgcttggctcgttccccggcaccgtgatcttcttcggcgtgtatgaatataccaagcgcttgatgatcgactcggggatcaactccaacatcgcatatctatcaggtggcttctttgccgacttggctgcgtcggttgtctatgtgccatccgaggtgctgaaaacccgactccagttgcagggccgatacaataacccgcacttcaactcgggctataattaccgcaatatgcaagatgggttccgtcagatcgtccgccaggaaggattttcggcattattccacggctacaaggccactatattccgcgacctcccattttcggcgcttcaattcgcattctacgagaaagagcaatctatggctaaacaatgggttggacaacgggacattgggctgggcttggaaatattgacagccgccaccgccggcggtatggctggtgtgatcacttgtccgatggatgtggtcaagacacgcatccaaacccagcaaaaccccttagagccccccgccggttcttcgggcgccaaacacactgttgaaaacgtaccgaaagaaagcccacggccgcacacgtcgacaccatcacattcccacccttcgcgggcacactcgcgaccaatctccacatcaggggcaaacacaacaatcccaccgccgggtacaccccgacttgacacttcctccgtgttcacagggttgaagatgatctatcgaacggaaggtattgccggatggttccgcggcgtgggcccacgcggtgtatggactagcatccaaagcgggactatgctggttatgtatcagtacctgctcaaacagctcgaggctcaccagattctagaagagtcttaggaccttacatctaactgcatgcatttccaaggttgctgttctttttacattttttttgtcattgggaactggaggcgttggattctttgtcccgatctgggatgttatgaccctgctttcagcactttgtatattgtgtaccctactctgtgatagattattagactggctgcggcctcctgtaccatatctctttttccaactccatattacatatattgacatatctatactccgggttctatatctgtttagactagtatctaaggaagaagggcaagccatgtaataactagatatcaacaggaaatgcttggacccttctatcatacaaccttggttatatattctcaaaatacatataaaaaagaaagcaaaaagcccagcggaatgacactgaacaaagggagtgaacgcgctagaccgtgttttgttttggcgatcggcggatgtaaacaattaccggccactccccctccttgcatcttctctccccccagcatttactttcttatttgatattggtccaatttctacagtgatatcggatacattatgtctcttccttatctcaagtcgttgaaaaagcctgagttggccgagttggccgatcagaccgaactcccaaagtaagaatgaatgcgattgccgcatagactgagctgatcaaatctatagctacaatgactataacaagaatgatcttgtcgtagttctggacagacacctccgtgaaaaccgctcaatcttctccgggctcaagagtctctctgaatactacttacgcctggcctctccaccccgcagaggaggatcgcccgtgaagcgcgaatccgcgcgaaccccggcacgaaccccggcacgccgctctactaagaaggaagtgagggaagaggaaacggatgaaaataagtaagagcggcctcaacgcgccattcgatacatcgtcatcacgcatatattaacccacgcagtagcgaggatgcggaagaacccgagcccagcccaactgtaatcagcccgacaccagctgtggggcgcacgagcgcacgccagtctgcgcgccaaacaccccaacagacaccccgtcaaccagcagttctctctaccgtcgtggactcagagccatcgctgcccgcatctccagctgccatcaccgaagctatcgacgcacagacgctcaagttgcgcgagagaattgaggatgcatggactgcatcgggcttagtagagcgggcgcattctctgcgagcaacgctgagcagcgggaaggcggttgagatcatcgtgctgctgcttgaaagcggcagtcttgcgaaagagttgatcccgatacgcttccttaccactacaccggttgtgcaagccgtacagatcccggcgattcggatccgggttcctgatttatttgtgctgctggaaggaacgttctgggggccgttttcgctgtggttccttacttgtctgcttttgcctttgatttctgcctactttatcaacttgagctggaatgcttctagcagtacgcgccgcacccagtctgcgcctaatctcgcccagtttgatccgttgacgttcaacatcgtcaaagccttgctcgtgcacattgtgtttggcaaaggtttcaacttctttggtttctatagtcggtatgctattgggaaggtaattgactccgtccctggtggagaccttggtatcttgactggatccgctatcggtggtgtgactgctctgtacgaagctattctgcaccgcccataagcgacaggacatgacttttgtgaggctgtacaggttatctggcgaatggttcttcagtggttggacgtgttttatctcatctgtctccaccgttgttttttcttcgtttatgggttatgcgatatgcgatattgggtttcttttttgccttctctttatctttcttggtctcccgttatagccagagcaggcgccttgggagttcttattctggttcttgttctgatcatctctttgggagattcttccctgcttgccctaatgaccgattcattattttccagtctgtgataaaaatatccgagagtagtagtatatttatagtcaagtttacgcatgctgcggacggcttttgatgttggctcaggcctttgttctgtagataggcggaatgtcgtcaaacctcgcggacgtcgacgacagggttcttgacggtgcttggagtcaagcggttcatgaagagatcgaagcagaagcccacgggcgggtttttatattgatcaaaacgcgcatgggacacgcagcggttggtggaagcaaatttcacatatatgctgctatgggtgggggctgaatcccaaattcgcaatagcgttatgtgattctaacagcctaggcttcgtgaagcgttaggccccggacagactgtcgtggtggttcctattaacctccgtacccaatgtcatgcttcacgctcacggtcacctcttcaacctctccgccaattccactgtaaacaaaaccgggacagaggtctcaacctccaccttgtcggcgcgaatatgattgctcgtggatatctgccctccaatctcggtatgccaattctccacatcccactcaaagccatgggttgtgatctcggcaggtgacgagagggggatgatcccgatattctcttcgaagaagtatactggttctggttctggttgtcgcacttgctcctgctcctgctcctgctcttgctcttgctcgcgcttccgttttctcggtgacttgcttacattagaccccaacgctgtcgcgatatctgctcgtcttgttgcaggtgtgtaaattgtattcttccctgtttggataatgaacgtaatgctttcctcggagacgagatacaggttaccacctgcagctggcttggcatcagaggtgtcggcttcattttcacgaatcgagcgttgcttctgcgtcatcatgtacaagtggtgcacttgagagaaagcctgatccacacgaccacccagaccgccgaggatcacaacttccagaggtgattgatcagatggtgaggttgctgtgctttgatttgcgccattggtcttcgatttggtccgagtgtttgctctttttcggggggaagccatgatatctgcagcatgtacgttgagatatttcagacatttcgtgaagtctgttgagtattggtctggatcttggaggatgggcactccgagcttctcataatgtcttcgaactgcggggcggatagaatcaaggtcgccgacaatggagtcaggaagctatatctctggtcagctcgatctttttgtgctgcagtttagaataaagttgcagtccagagagattatgcaattaatgtctatatatatcgcttactgctttagatccctttccattaacttctggcatatcaaaaagccgattggcacctccatcggcgcaaataatataggatgctgcattggcattagcatcttttatccaggaaactgcatctatgcacaattcatatagaatcttaccatatctgctcaacactccaaaagcattctcattgattggctggttaaggatgagaagagcgtaaggcgaaggactcccctcaggacggaagaaccggctgggatcccattccattgcaagagttgaatacaaaccaaattgaagtccaaaagacgtaaacaaaccaagagaaatcaaggccgaaagggttggtggtgacgatataattatcttgaccaagctgcaacgtgactggctgacgcgggcacgcaacctcaggccaaaatccacatcgctttccaacttctccatcccgcggtgtttcgactctcttcctctcaatcccttcttggtggaactctcggtcaattcgattgattcgcactcctctcacacataatgttccgccccgccgctcgagcgctcgctcgcgcgcccgctgtcgcagcccgtacaccagcgaacagacgattgataagcaccggtccgagcaagtcgagaagctggaagaataccttcttgcgattaggcttggccggtggtgctatctactactacaacacgagcagtactttctccgaggagccgaagtgtacgtgtcgccgattggagttgggtgttgcccttgttcctcggtccccggggttgcaagccgcgacaatcccgtccccgtcaaggttctgagttctggaatcacaaatcgctaactctgcttccatttggctttagtctctatcctttcttcaatccggaaacaaaatgttgatgatgccaacccccagactctcgactccattactcccaggattcggcaagaacgagctgccgcgcaggcccaaaagaacgagtctgctgctttggaaggtggactgaatgcccaggagctccaggaggaggctggccaggaggctgcgttcaacccggagaccggcgagatcaactgggactgcccgtgtcttggaggcatggcccacgggccatgcggagaggacttcaaggctgcgttcagctgcttcgtctactccgaggaagagccaaagggtatcgactgcgttgagaaattcaagtatgttttactgtcgttttgagggcagtggtcctgtgctaacaatttttgcaggggaatgcaagactgcttccggcaacaccccgaaatctacggcgccgagctggaagacgacgatgagccccaaccccagtccgatgctcccccctccgaagctcccgctacccccgaagctccatccactgccgccgagctagatgcgtcgtcgcaccccactgagaagcagacccgcgccaaggatgtcaacacccaggtgaagaccgagaccgttgctgcaggcgataacgtcgagggcgacaccctcgttcccaaggccgagcttgacgtcgaggagaaggagcaggctcgcaaggcttagaaccgacctgcatcctgtttgacgccaccctccctagagacaagcctactgcttgatctctcttctgtaatgcatatcagggactgggattggacttgtgtattatatagacctttctgccatctctccatctcccgtactgccttcgatgcattttcccctcctgatctttcagcatatccattcccccgatctgcgctcctctgtgttcttcccgatacttcctctctgtcaatgtgtaacttagtgtactgatatgctttacgctcttgtcctttggacaaataaaagaaagaggggaaatctactagactttttgcatcatgactggtatccagtatggagcttttgtataagcgctagacaaggtgggtattttccgtggaaacttgttgaatatagatatcagtccctgcaaaccccagcttctcttgggagaatttccataacggaatattcctgttgcgagaaacgggagcgattgtcgcccccccccccccccggcaatcnnnnnnnnnnnnnnnnnnnnnnnnnnnnnnnnnnnnnnnnnnnnnnnnnnnnnnnnnnnnnnnnnnnnnnnnnnnnnnnnnnnnnnnnnnnnnnnnnnnnnnnnnnnnnnnnnnnnnnnnnnnnnnnnnnnnnnnnnnnnnnnnnnnnnnnnnnnnnnnnnnnnnnnnnnnnnnnnnnnnnnnnnnnnnnnnnnnttttcccccccccccccccccggtgtctctttcaaaagcaaaaaaaaaatgcatgatgctccgcgctaatagctgaagacttaggggaattaagggaaagagaaatcgatatcatagagagtagcattcccaatgaacgacgtcctctccgaccatctctgtccatattaaatatttagtaccacctgagaagtataaaaatgtagttgattgtttgatcttcctcttcttactattgggcttattaggccaactcgcattcgatcaagctctcgacactgtccagcggcgtccagattttagcaattctgagcccaaccggctcaataatttgtgccactgctgttcagtccgctccttagcagcaagatccaccatcattattaggtccagagaagtagcctgccagtgggccccagtattgggaacaacgttctcattgatcagcaacttgctgtatccgggtgtcatggcggcgaccaattgtgacaagattttctggcatatctcgtcgttccagtcgtgcaggacggagtgcaagaaatatactcgcgcgcctttggatatgtcagctactagctaacgctctatgtgtgtcaatccactcacccttgatgggctgttcttggtagaagtcgtgggccatgggcttaattgccgggttcagcgacttgatatcattcaaaacatgcggttggtcttgcaggatcaatctgcccggtgtgtttggccacttcgatacgaactcgtctagatcgtgccctttgtttcccccaacgtccacaatgaatacgtcttcctcgccggtctttgctccctcaatgagagtttgtactgggtagaaatttccatccatccagctaggtctaccttggtggtaggccgacatgagattgttgaactgagcgccgagttcaggatagtcggggttcttgccgttgaggaattcgaagaagggatactcggttttgaaccctagagtaaacggacagtctgtaccattggtgggacttcgataattgtttttcttgagccaggtgggcagcacattgattgctggaagggtgcatccattactgccagcggaaatcaaatcagtacaccaatatggacgggagaacgcctagaggtggaactacttacatgcacggccaagcatcattgtaccgcttaatagccaacgtggtagttagcccgttgcggccatactcatccataccagtttcgacaaagacacccattgtggcgagatgcttcatgatacgacctttgaaattataagcgtcataattatttgacttggaagttatcactgaccgagaagttcgggttccgcacctgttattgctgcgagctctgctaccgttttaggcttgtcagtctgcgctaatatgcagaagatccccagatcgatgcaggtttcaatgccggcaaacgctgtgggctattacgcataaacaatcgaataagcatccttggttcctgaactaagatctccgttctgacgtacctgggcccagcagtatcgtagcatggtttcctgtggcgtttccattgcctgtacgagagaccgggctgtctctagcagcttcaggcgcgcatcggcgttgccctttctgtaagcctgggaatgagattcaatttccttttgcaaatgcaccagtttctcgggagcgctgggtgtagtggcaacttggggatgaatagcaggtctgtttgataaaccgatgactgtcattttgaacgttgtccgtgaacttggaacaaacaccttgcaccgagagcaaatggcaacattagaacggaagtatgaactatccccagcatctggctagatgaggggaattgctgtctaagagcgatcatttgtgacaaaagtcccgatagctaggtatctcatacttagataaaaatgagtcaacctgctgtgggccaatgctataagaggttatcgcattgttattgtttattgtattcttcatttattcggcctgaaaaataatggagccagtccaactaaaccacttatagatgagtggacagggattatcccgtgtctactatttagtgtatgcgggtctacgatataggacgaaaacttgttcaatagactgggatccgcacactaaacccacttgcagttactggatggaggcttcgcaggaccatgatgcatgtcgctaatgcattttgccccgtaatttacgccagagcaggccaattgaatcttgtcaagattctactatagtcaccctcggtttcaatgctgatgcagatagggcaacaaaggcccaagtggccaactattcttgtacctatatcaaaagtgagggtgaatgaccgaatttcttgtcggaggtgatttggctctccaattggaccacgggagctataccactcccttctatcagtgagtcgtccgtgtctactgtccacttaaagttgggtagaaatattgacgggccttgtaatacataacaaatatcattattcttgtttaggacggcgagatggcacgtaagttgcgtcgcgccgaaactgagaacgtcgagctagtcactgggaaccaaggcgagatggttccagacaatatacgcaagaagattgactatctagcgtcaaatggccacatcttatccgcgctttccactatcatgtcttcaccgcgagactcagcgtctttagcagtctgtatccattcatcatacgctgcgcgatgaacagccctcgcagcatcctatgcatcgttcaggatccatccgtgagaatctgtatcaagtgtgttttttagccataattttagttcttaaacggactcaaaatcttcgtagtctcgagcatgctgctttaattccgcttctacgggagaatacggatatgagccttctaggcccagttttttccagctagtaaaaagttcaatcaattcttggcggacagcagcagcggagtcgctctatattatttggctgtagtgaaagagtcggaaaggagttgggtcaagtaatcttacagggcggagtttaggagtaaggcctgttatgattgtattatatatctggtagtagatggaattatctcttagttctctttcctactgcttagaaagtttagggtcatcttgatcgttctcggatgaatctttattaggaataactggaagtatagcaaaatcgggtatcttattggtatagataaacgcgggctcgacgcttattgattgctaatctattaggctattaataatagttggttcgttggctgagacgaagatattcctcttatagaagtctgggtagagaagagctcgttttcccctagattccggttctagaagaccggtctgcaatatggccctataaagaagacctgttcgaagggaaccttagatttagagtctagaggtatatctgcgaagtatagactcctataagctaggaagtccagagaagctatctttcttaatgttaatgaaagcgctttagtatacagtatatactgttctgtattcattataggctatacttggtatagttatatacccgctatatgctcctagatgatatattcagtcccagtcggattagaaggattatcgttctagtcgagaattttcgggataggaagtgagatcttagactatactataagagatataatgcagtaagtatatcagctatatcctggtatactaataagccttacaataagttattattacaacttcggagttagttgttagccctagcggactagtaatactcgtgggtatccttactataatgcaaggtccattgtccattattaaaagaaaaactcgactgaatccaccttcgcgcttcttatatttgataattttagttgctcctaggcatatgcgaatggcccgctcacatagcgctgagaagtcaaacgcaatatagcgcgagtctcactcgaggttatcccgattgagccatcttctaccagtgtacgaatgcggatcatcgcctttcaaagtccctaaacaattgcagggaattcaggttactactaacgaagagtcggctgttgcgaatctgttcctggggatgagctgcggggcctgggatggggcacaggggcgttggttttgtttcctatgtcagataatggtcgaatggagtaatggaggcaatgccgagtgattgacgagggaaaaccgaaccgtcgccagactcggagcatattggctagctggtctttcttttcttgggttcaaggttggatgctattcaaatctacaccgcctggcacgcgcctgtatgacgcgatcttaaagccgatgctataacgtcgctgtgacacgttgtcttgttattctcaaccctggatgagtatgatcggatatagaaaaactaaaggcaagttccatttggataaccttgagaaatcaattgccgctggtcatatcttagcatcatccgccacaagaattcggatacatttcacaaaccacttttagatctgatctcctttcgtgctcagagcgagaacctctgtacaaagcttattcaaagctcgtatgaatttatggaggctggaagattgtcccccactcgattggggcacatggagaggcacgagttttcattgcggtatactccatacttgagtggtcgtcctcgcagatctagatcttcaagagcctaggctcccaaaacaaggaacccaaagccagctctaacaattcattttcagtaagtgtcccacacagggactttaggaccaaatagaccgaaggatcttgaatttgcacactccaattacctacgcatatctctcctcagtccgacctcgggagatcctcggggcggttacaatgagtcaccgtctagtagacggcgtctacggtaccgcgacttatccaccgcgcatctacgggccgccagcctcggtcctcggcatagtaccaaagggccacgagtggatcattgagcaaatcccttcggtggatggcgagaataaaagtaaaacggttcaattatatcattgctctattttaagagtgaaacagcaaaaaaggagttgaacgcgcgcgaacggagtacgatcgttcggggcatattgaagcccatcgatactcagtatctgattttctcatgattacagcaagtgtggccaaaccgaggcggctggcggcgccacccattgtccggtttgagacgggataatcactcgttcgactaataactgtacacgttgaagaatatcattgggtaattgtaagattttgaccgctcaactggcaaaactgagaactcgtcgggtcataaagaatcacgagaacaggccaagagacactgaagaggtatggactcccaaaacgccgaagattgacaagaacgaatataacaaaacaagtttgtaattactcgcaccaaagtcagcatcgtaatttcagcatatcattgatgatgggatcatgttgaccagacaatgtcacaatggcactctcgccacattacaaatatcggtagagtgacagtgaggactctccaccttggaaattttccgtcacttatacaaacggaattaattcacaccttttaagaactcccctgttcatgcttaagggtatactccgtcgtgacccgaatagccatggggtcatgctgtccatcactaactcccaggccctgatttccctcaagaatatactcctcactttccgccccggaagcgcgtctcgccttatttgcattcaggacactgtccagctcaaacccgccactcttccgagaccgcgacgaaacaaacgtcttcgtcttcccggaagttccattgcacgcatcactgttgtagtagtggctcttagagttcttgcggttcgtcgagcccagccagcgcgtgttgcggaagagcggtttgatgccgggtagggagacgacgatggctgcgacgaagcattcgcggtctgcccagccaagtgctgtgccgaggtttgtgatcgatgaaagtgagtagtaggcgcgtagaatcgtgcagatcataatgaagactcccgaggagaacatcacaaccaggattattttgcgttcgattgggatttgaagtttggcgaggattgggattgggatgaggagtatgcaggtgtcggatctgtttatcatagtgttagtatggggttctgggctctggggccttttggaggtgacttgcactacgttgaagacggcgatgacaatgtaaagaggtccgcggagagtgcagttgtctgtttcggttagttggctgtcgggtgaataactatcgagacttgcctcctgcgtagggtttgatttgccaatttcgctcaactggcctgcagatacagacatgcgtcaagaggcaaatcaaccaggtaatcaggcaaaatgctgcagttgctgtaactaggtgacggtgccaggttccgtgtctgtgaagtcttagatatgctcaatagaccgttgatgggtgacaagttgacatacgtgagtttccagtaaagacatagaagaacaccctttagacaccaaatatagcagatgtaccatatccagttcatgaaagccagcttcgatccgaggatcatatcagatattttgctgtctgggacaagcatagctgtttgctcgtctagtccgatgttgtttccatacacccctatctcaacgttagctgtgttgtaaggggtaattatcgttggtatttacccagcagatagatgatagcagtcatcgtggtccaaaatagctgccatgacactgttaaaacaaacctagtgaagcttggggaaactgaacataccatgccagcaacagcaaaagcatcatccagctggagcccgcgaaggcctcctatatttagtcgggcaaatagccggactaagaggaagagcatgccaattccatattcagtgaaagtctcgactgtcaaggcatcggcggacatggtgaaaattcaaaacaatgacaatgtccgttcgtgacaaaagcaatcttggatgccttgacaataagatataacactatggagaaaggatctcccgatattaatttcaattgatcagaaacggtgcgatcagactggatctatcacctccagcttcttactacaacataagcctcgctaggtatcttcgctccgatctacttcaagatcaggccaaaggtctatgaaacacatccgttgtaggatcagtctctctgctgttcagttcaccaaactcgagggatttgtcgctagcataaggtatcgtcggcaagtgatagataatctcgctgcttataatcactctgatgtcgcggtgattagggacactactactctgtacaacatgccgatattttccgcaatcgtgtggcacattcctaaaaaagatttgacagggatttgtgcaaggattttagcaaggattttagatttttctgacagtaatacccttgtctaagtctaagatggcaccaaatttactgcaggtgtaatgggacgggaactacggagtacggagtattgccccgcgacaaaggactgagttgtggattcaaggacttcgattgtcccgatttcaagaatagagatccaaaggatagccgtgcatctggggcatatctgatttactccaagtcaagtattgaacagcttatacctcatctctcaaatatgaagaatccaacgaggggagctgtcaaaaaaccgaatgttacctgacaaataatagggctgatcttttcaggagcccggacattgcccggactgactccgtgagagattattagctcaagaaataattagagctgtggagattgatggcaaagacaatcacaacccggtacggattcattgctacacagccatccgaagaacctacgaatgatataagagttctcccaagtagcttgatttgaaactcatggaaatcaagaaatctctgggaaatgaccaaagtcgcattaatcacaggaggaggtgtgatgagcccccgcataaaactcacgaatgcaaaaagaggctaaacttaactaaatacacagccagtggaatgggcctggccgtggccaacgctctatccctacgcgaagactgggaaatccacatcctcgacatcaactcggagcgaggagcccatacagcaaaagaactaccccggacaatattccatcacgccaatgtgaccaaatacagcgaccttgcagccgcgtttcaggacatgttccagcggcatagcaagctggactttgtattcgcaaacgcaggtgtcattgaacgcaccaacttctactccacgtcacaagcagagaacagcagggatgtgtgtccaccgccggagccggacctgctctcgatcgacgctgatttgaagggtgtcatcttcacggcttacctggcccagcattatttccatcactcgtctcacagaggccgagactcgagcttggttatgactgctagctgtggtgggttgtatccgtctttctattcgccgctgtactctgcggccaaatgtgagttctccacctaatttgtacagtatccatgtactccgtatccccgcgtactattgtaccgtcatatgatatcgatgtgatctgttggctgcgatctcatatcatctacaatgttatttcttattctgctgaaacgaccgaaactaacacaatacagtcggcgtagtaggattcatgcgatcgatatcgcgacacttccacgcaagcggaatccgcgtcaacgccatctgcccaggaatcgtacgcactaatctagtcgactcgacgggctgggacagttttccgcctggtcggttcatcgatgtggaaacgatcgcccggctagtgctccagctcgtggatggtggtgaacccgcgggccggggactgactgatacacccggcaggcatctgcccctggaggagttgtacggagttgcagtggagatctcggatagcgggttttatttccgggatcagcatgtcttttgtgattatggtatgcgtgaggtgatggaggcgacggtggtcgaaaaccaagtgggtgctgttctcaattgttagatggcggaactggttccgtatggagatataatatatcatgtcgtatgttgcaagatcatcggtaccacttaggcaaaattggttagccttgtaagttgttattggtgctggtgtttagatctctgcgataattacataattatccccgttacgatgttggagtcttcgggcttgtctgtcatctttcttttgagcttcctattttggagattcattatgacagaacaaaataggccaagtttcaatgaaatacagtcagaaaaggggaaattctacagaaatggcccccaacgagaaacacgaacagaaaaatacacgggaaatactccacttatacttgcaggggtttaagcgagtcatcgatttggaacctcctttgcggatttatttctcgatcacatggaccaatcaagtagtgaacgcgagattgaactcgatcgactctcgtccagtttatgttttctaaccataaatggcatggacgggccgtccgggacgagcgccacttccttgaagggtcacttttacaggggccaagtcacgagcagagcgttgaagcgggaaaaaacacgggccagtaccgatgagagtggatttcgatttctcagggcaagagcggcagcaccatttacgagctctcactcagatattacatgtgatagatcacattttccgccgttggagacccacgcggaagagaagacccctgttgccgcggacaagacgaatgcgacaatacggagtcgaacaaagctattattggctcgcttgggctttgagcttgggggtgaagatcgtcgcagaccgtgctagtggtggagcctatctgtacttttttatgacgcttggcccgttagggcagtagtactccgtgggtcgggctagaatagatgaaatgcactgtattatttcctacaggtaactcttccgatatgctcacggaatagcatccggaagcccagagtcttccccgtgcatgatacgaaacagtggctcccagaccgtgacagcccgcttggtgatatggccatttccaggttcaggcatctggtagtagatcagcttgtcggctgaacactctaacagctgacccgacaggccggtcgagtcttctaggaaggtttcgtagcctttgagaatggtctgcacagaggtgagactaatttcaaagtgatgtcagtgttctgcaatgttcaagagcaacacaaaatcttaccattcaggcgtgacagcggcaatcatctcgggtggcacaataggcgtgctcacaatccccggcatgacacaattgatgaaaatattctccttttgcttcagcaatggggcaacaccccgtataaagtggtttaccgcagccttggagccacaatataccggatacgactcgtggggaaagatcgcgccaatactacccgtgacaacaatacgaccaccaggctgcgggttatggcgcatgaaatggattgccagctgggtcccatacacaacgcctttgtagttgatatccacgacagacaggtccggtgccggcgggatgttgtcgatgctgttggtcttcgcgtcgtagatgtagatagaagatgtatcgacaataccggcattggcacataaagcatcaatacgcccccagaggtgatacactttgctgaatacactcgcgtattcttcgtagttggagacatcagcggcgaagaaatgcgctctgtcttgcggtaggtcttttaggagggcttcaccggcctcctggcgccgacctacacaagcaaccttccatccttttgtgcagaggtccttggcgagatcaactcccattccagactgtacggatctttgtcagtgactgatagcgggtcctgtgtagttggtttcgtactgacagtggcccctgcgacaatagcaacccgtgtttcaatatgtgaacccatcatacgagctgagatgcgataacgtttgagagttaatgaggaaagaataacttttatcgaggataaaagaaacgaaagtctaccggatcatagtgtacgacttaatgctcgggggtttttcctcatactgtagtggatcctaagccgttgggaagcccctctcctcttcatataactaaagtatggttgaagttaattgttaaaattgtttatatttcctttccccccttttccacccattgcattattgtattgcagcatggctgtggactcagaaaagggttcggtgcaggctggttctccaacggagacaccaagctcaccttcgatttccaatgaaataactgagccagttgtcactttaaagacatggattgtctcttcggtatgcatatgacaagtctactatggtgtgcatgctaatcgcgcatagattctttcttgcggttatggcctttctttctggcctattcccgttgttgcggcaattggcagcatggtctctgctgacatgggtgatccgactggatatatctggtttatcccagtgtgtaaagatgattcaaacgatccaatggaaagtactaatccaattacaggcttggactatctcgatcacctgcgctttcttgatcttgtatgtttataagatatatcttcaaagtccaaaactaattagatttcacagtggcccgaatactgatcttttaggtcggcgttggttcttggtgttgggcaatctggtaattcgatcattgcaaccaaatacatggcgcgtctaaacattcctttaggtatgcttcgtcggtcatattgtggtagcatcagcaaagaacaccaaccaaatcattgccgggctcgttatatctggtttcggcggtgcaaactgtcaggtatgagcccgattatacccatctctcctcaagtggaccagctaaaagatcattcatcatatagatggctgcattcgcgctgccagaactcctccccaataaatggcgacacatcggagtcgtgatcgccgatttcacagtctatatagccgtcattgtcgcaccagtaacagcccgctacggctacgagcttggaacctgggcctggaacttctggggcgtggccatcttccaaggtctatcattcctcggcctgttattcctctaccacccgcccaagcacccgtaagcaagcttccaagcctaaatccagtgaaaccaaccaaactaaccacacacccagcctcggcatcccgtacaaagaagccttcaaatccctcgactacctaggcgccttcctcttcatcggcggcgcagtccccttcctaatgggcattgtctgggccggcgtgtacgactcaaacgacgtccacgtcgttgcccccctcgtcgtcggcgcggctgtgctcatctgcttcgcgctgtgggaatcctttggcaagctgaaatacccgctgacgcccacctatatcttcgctagctcgtggggccgcgacttcactgcgcctgtcattgcgctcggcgtcgtcaatatgttctactactcgtctagcatcctgtggccgcagatgatcacagtgttctacacgaatggcggcgcggactggaagtactctgtcattctgtcgttgccgcagggattcgctattttcttcggtgctatccttctcacctgctttggtagtaagctgcggcattggcactggcagcttaccgggtcggtgtttgttatggttgtttttggctcgttgcttggtattgttacgccgactaataaggggactatgattgctttcatcttcctctctcaggctgggtttgggtgggctctttatttgagtattgcgattacgcagatgggtgttgagcataagaatctcggtgttagtggtggtatatcggggtgcattcgctttgctgctggagctggtacgttttgactttattactctgtcgtgttggatcatgctaatcctcgcctttagttgcgacctcaatctaccaaacagtctacagtaacactctggcgaaatatacggctatatatgtcccttccgctgcgatctccgcaggactgccggagtcgaaggtcgcagacttattggctgtggtatctcaaggtgccgcggcaatgaaatcatatagtcctgccgtggtgacagcagcagaggcggctcttagtcaggcctactgtaaagcgatgttgtaagcacacatactcacatatctcttacccgcactcttcgcaggaaacagtaggaaagaattgtttctaatggtttcttccagtgttgtggctatggtatcgatggcgtttggcatcctgggtcttgctgcttgtctatgctgcaaggatgtcgattcaaagatgaccaacaaagtgagtgacgtcattttctactcggggatatatcaccgagaaactaatgggcttcttttctttagatcgaggtgtatcttgagaacacagatctttcggagcgaaacaagtatcattagattcaactgtttgagcgctaatatgctagtgaaataatgtgccgtctagcaaaacaactcagcatagcttttgagacaaatgcattcagcccaccatattaaggagaggtcagagggcaatttaacaccattacttgataaaagcaatcccttcgtttttttatcttcgttcaaagagatccagttacattgattgctgctagacaaaagactagagatcatggctaaaagatacacctacggcataaaattgatatttgtgtcatccagtctgattcattctctacttctcggagccatttgaacaccatcatccctagatcgaatagtgtacgatcttcacaagagggcagcaaagtggtgatgtctttcgccaggcaattgatgattggcgaccatatcgggatttgggtttctgtatgcgggtaacatcgagccctcgacccagtccaggaaccccaatcaggatgggaaaacgattaaagaaggatcacgggcagcaagaggagtgcatccatttcgatggcattcgcgacggggtagattccattagcaagaacggattcctggtcatactcatacggcattgcctactcgcgttgtgtgcgacgtcaaccagaaataagctcattgggttgaaccaagagcttttcacactgggtagtgcagagacgaaagaatagatccacggtgggacggccgccttccatgggggaaaggcgctggctgttgtgtcaagtgaagatatggaatatggacctcagtccagatagtggcagcattcattaccagttgacgtcgctgagctggagcttgcgggaacggaaggcggaccggttcgcgccggccttgtccatccgctggctggcgggggtgcgcttttcttgggttgctgctttggtatgtctcagttggggcttattcgggttaactaggggatactgctcactctcggtgggttcgggttcggtcgacgcctcgtaattcaggaccaggttcttgatgcgctgctgttcttcccgatcggcttgttgctggctccgcatggcaatagcaaaggtcgagtccgacgggagatcaatggtgcgggtctagatatgattagcaatcggcataatattgcgaacgcggatggaaaatactacctgttgcttgtttcctttctttgtcatcagggaaaaggccattgtcttaggcgcaactggttctgccggtactggctcagggctagactcgctgggcatgttttcccggggacgtttcatgggaagagggatatcaaagacagtcttgcgttcaaaccgtctcgagtccatgctttcggccatcattttttcgaattctcgatcaaattcagcctcggttactgggtcgcgctcctcttcctgtctggtgacaacgatttgttcgtcctcggactcgctatcgctgtcgtcattggcctccgggttgggtccagacaccttcaacgggttaaacgggttaatgggtcgtacttcatgtagatgagatgggggacctacttcggcctcatcgctggattcctggtcctcgtctatttcgggaatagcatcctcctcaagatcctcgtcagaagagctgctctctgcgtcttcttcgtcggcttcgacgggtctctcggaatcctgtacgttgtagttcaaggcaacagcttcgctgaaaatccgggtcgcttcttcaccctcggtagcaagcttccactgcgggcgaatagagtggtatgtatcctggacaaggaagtcgacatccatgggcaacggatccttggtaaataagtagtattgcaagaaggcaaggaagaaatccaatttcttcttggcagagccacggtcaaagcagtggccacacgtgtcaagaagggtgcatgccaggcgcaagcggaagtagtcgtctggcaagtctagcatactgatctttccacgggccggagtcccaccctcatggccaaaggtgataatgcggtacagggtatcgaatatcaccggggaatcaatcatcttgtagttgtagagctcacctagatatttgatttctgcaatacgcttctggttaaatttgaagtcattctgctcgaggccaagcgtgacctgctccaggacattgtcgacgattccgatcacgaaatcctggtggtaccggtacaaagcactgacaagaattgccagaaggtgaatgctgccatatttcactttcaccggtttgctgaacacacgttctaggatctcaacgacctcttgctcctcccagtgaagtttgcggatggatttcaagatcttggtgtaattccgcttgttcatatccaggtagattagtcggcggatgtactgctccatgggggtacgttccttctgctggatcgctgggcgcggtggggggtcaacatagtagatggcattttcgataaccatccgctcctgctgggccagatgttgcacggtcttcttgcgactcaaggtctcgaggaaagaagccatccggggtgacgattcgggattgcgcaggagataacggccgcaattctccagcaaatggccgatgatttcaatgttcatgcgcgaaaattcgtcaagcgaaaccttgaaacaatggaagataatatgctccggaacgacaccgaacttggtcagttcagctaggtagcgaacattgctcatgcgtacttgaccgaggaattccttggactttcgccgctgcagacttcgaaattcttcatcgaggtacgtggtcagtccctgtggaatatctggcaggtattgtccaagcgttgctaccaggcgagaatacagtggcaaaagatcgatgcgacccttggggatgtccgacacagctttgataagcctgtttcgtgatgctttggagttgacccagcagaaatccagggcaaactggtcgacttgatctttggtttgcaattcggggagcttggcaagaagggagtccacctgagcacccacagtcttgctggcaatggcagttgactggtcatcagcctccgcagcggccttctcgtccgaaggctctccagaatcggcggtttcaccatctggcttctttttaccagactcctcgccttcactcttcttctttttgccatcctcgagtaaaaccgcaggtaccttgcccttcagatcgaccagattctcatagaaacgtctttcctcctcgtcttcccaaatcccagcgccttcaccttggcctcgtaagtaatcagtagtcttcacaaggccaataccaccactggcagaagcatcggtgggttccttctcggctagatcaggcatgtcggttcccaaagcctcacagagcacctgcgtattggccacgagcttttccaggaccttggactgcttctcaaaattggcctggcggtcctcgaagatctcaccactcttcacgtacgcttcggcattacggcggttttgctgtgccagcgctctctggtctcgaaccacgtgagccttcacatcctcaaggtaccggttcaagatatttctgaaccgctgctggattttttctggagtcaggggcaaatcggtctccgaggacccattggtctccgtagtctgcgcctctgcgccagagattgtagtagcgccatccgcctcaacggttttcctgccatcttcagcaagcttcgagccgacgatatcccagctaaagctcttcacaaacaagacagcaaggggcaggtttgtatgatcacggtcatgaccgagcaattccttcagaacctccaatgggaacgggtcagcctgtttgtcctggtccttcgcgcccgcggcgggggtcttggccttcagcggcgtatcggacggtttgttcccaatcccaactgctccctccttgcccttcgcacccagttcctcaggtcgctcgacgtcatcgagagtcttcagcacattgaccagccaaagctccgtaaccacgcggagaagaacgcggtgtcgagacaggcggtctttctcttcgcgttcacgaatctcctgactgagcgctttgagctgcgctttatccggtgtactcagtccgcggccgagcagccagccgatctgtcgtgtgaattcccaaggcccaaaacgctggtgaagcgcgctcacaacctcgactccagcggcaatttcaccgggggatttgagcttgcagagtccttcgtagcaggcggaaatgatctcggaaaggtatttgtggagcgagagggaacggatgtcggcgaggaaagtagaaagggcggaggcactgatgccggtgcgtagacgtttgatgaatgcggtgttcttcttgagcgcggagtcaagggacttgctagtggggaatacatctagttgcaagtggttagcatcatctcgaaggtgggctgcaatggcatttcgtcataaagggagtcagatgggattttaccagattcgcctgcccaggctcgctcgttcaggtcgcgaagctcccctgcaataagaacgcgacatgtcagtcaatatctccaaggtgaggtgtggtagcccgtacttttacgttggcgatccatggctacaagctcaatcgtggggtcctttctgaatgtccgagaggaaagcgcataagtgacgtgaatgccacattggggtaaaaggagataataagagaacagcaccaagctcaaagctttgaagtgaagcgaagccggtcgaaggtctaaaagtccaaaggtctaaaggcggagagcggaggtgaaggcggacttttatttgcttatccaccacttgtgcgataacttcttgtacctacttcacctagttactttcatctcttaacccctttctcgtttctcgtgtgtgttctttgaattcaaatttcaagtttgagtccgagttcgagttcaatttcaatttcgccttcaacgccttttgtgattcgcaatttacaagtctatcaattcattgtcccaaaccccccacttcgccaggtcccaccatgagttataatgcatcaaaaggacgatcatcgcagcactaaatgctgtttcgggctattttgatccccactatgcgcctctgtgaacccggtttcccttcccttttgcggcccttgcaatcgtttctgcagctggtgtttgcggtcctcgttgctccagctatgttggcgagctaaagccggcttccagcacttctcacatagttcctctgtggtgggacccggtgacccggtagtgtttgaaggactatggctctgagcgaaagggagaatgatgatttgttctttgctggctgggactttgccgtggttatcattgtgattgtttgatgccatttcgagtgtggataagagtaatatgtagtagaattggacgtagatggttgccagtggctggtttgaagctagcttgtggtatagaggagaatagtgtgtggtggagaaactagtcttcgtcttcagtatattcccagcttatctgcttgtccttttatatttcttcggtgcggggtatttaaagtctaattgtcgtgtggtcggatcatacggtattcggcaatggtgatccatacgtccatggggatcaaggacctgtcacaacaatcaggtatttgatatgggcgaaagtggtgacgtgcgggtggcgacgatatcgggtgggagtggaactgacatggcagttgtacaaaggaacaccaattccctctcgcacaatagcaatataccaagaattggaagtcttggcagtgatagtatacgtactcgtacatgagcctgtatttgccgtattaccggggatctaggcgagtcgaatgcttgatgattgcggtgattgattgtaatgctatattctcaaccggacttcattccagctgccaagacataacaactatctacggacagtatcaaggtaattgttcgaacagatatattgaaattgacgagctaacatacagtcgtgagtacgttcaaccattggaaagcaaacggacaaatggcaaaaccaacaaggcaaaagcaaaggtaggatacatatagtcgaagagcacgtgacttgaacagttccttctggcagggtcaagctggtgaagcatctctccaaacagacatctgtgacacatgagagccggtatcaggacaactgatatcaaggcaaaaaaaaaaaaaaaaaggccaatgatggccaaaggtaacatgacgcgttgagaaaccaacttcgggatatccaaggcccaaaacgatatagacgcgcttttgggagaccagagtatcgtacaggttgatggtataacaaggagataagtccaaaaaacaggggggggaaatggcatacaagaaaaaaacaaggcaagaaaaacaacaaggatgttgataataatgaattaaaatcagggtatgcctcacgccacgctatgcgagtccccccagcagccagggagaccaagaatcactggaaatatgtactgagaacatccatccgacggtggaaagacataggaactttttcggtcaatgattcatttgggcttgcgccagaagtattgctagacacaagtcagcggggttcgggtacatgaatagatgtatagatatggaggtactcaccttgtgctgcttccgacagttgcgcaggcctggtttccgaagatcatccaccacagcagatcgtcgcatcgtatcatcatcctcatcgggaacgtagtaatattcactctcaagtggcttgccggcggcatccttgccttcacgggcaactctgccaataaacttggtcgattcgagaatattgcggatatcagaccgggacaggccggtggggtactcgtgtccggacttccagtacgcgggagggagattgttcacaatagtggagaagggcgtggaggacagtcgggagaacgcaagttgattggcagcatggttgcgaactcgctcggaccgttcgtcggtatactggggtttagcctcggtcgactctacttccctatcctcttggaccgtagctggctgtctaggggaccgggtaggttggagaggttgggcaggaagcaggttgcgaggagaacgagtggtctgaacgggggaatcacccgcccggaaagaagccatacgaggaagaaggttctctccgaatggtccaaaggagtgaatgataggatcattctcttcgtcattgtcggagaactcttcggatctactcagttcactcaactcgctcgcccgcgaggtgtgaagcatagcggtagcacgacgggcactctgggatatcactccagtgacggtgttgtgacgcttcaatggagagggctcatcctcatacaccactactgcagcacgggaacgagaaggtgtgaagattggcgaggatggggggatggcatgctggacagcaggcgaaggggagacgggcgatgccagacgctgacgatccaagagcggactttcctgcggctctcgtcgggattgacgccgctgagttggggttgcttcatcactggtttgttccgagtcggtagaagggcaatcccttcgttcgctgcgaggccattgcaccagaacacgagcctcgtggacatctatcatgatatctgcatctttaatgtccgaggtgaaggtctttcctttggccaagtcatatttcctcccttggcagtgaatctttatcccattccatcccatgcacacgatctcaaccctatcccgatcgaatggattcggagccggcttatatgtagccttgacatgaacacgagagatcatacgactagcagcaagttggtgatggcatgagacactggaccttcccatcagaataggctccccattctccaacaacattatcgcaggcacagcagacaaaggcgagcgttccagggcagcggagaaggaccgtgacagagaaggtcgggaggcagcgacgccacgaggaggcgaagaggacatgatatgggtcgacgaggtcgggaccggagtgggatacgtcgagacatctggttcgcgtgctacacgcttttgaggcctaggaagggagggcgacgagctcggctcaaaggcaggcagcagggctgcaggacgtttcacgcccaagatcgagccaactcgactcttcaatggagaggactccatagtagaaaggtgggatgaagtcgaacgagcactcctactcacgaaaaataaaaaaaaacctgagtcgaggtcgaggacccgcgtctccgtgttatacaaacacagagaggaacctggggaattttaaaggaaagaaagacagcaaggcctcccctagagaaacaggtgtggtgggagtaaaggaagtagtcaaggagtaaggaggagaagcattgaagaaaaaggtcgaaaggtgtgtggtggtggaatgccctggggcggagggtctcgtccaccctgcgcggaaatgcacgcttacagtccgagacgcgttcgataggcgccaaccacgctccactgcaggctcgcgatttcaattgctgtctttgtgtattgtacagcgaatgactcgtaaatagagtgccgaaaacgtgaaaaagcgcgaattaaacgtttgtttcctcttaacttttgctgtcaactctatacactgcaacgcgtccgcgtctcaaaacacgtgaccccacgcgagacagtaaaccaggtttattgtgtcaggaatggtattcatgacctcaaaattgttcttatttaccctgtagcccctcggacgatttcgaaaaagcgagtgcaacttatatcccctcttacatagtacgcctattcaagtatcaggagtcaatggtgaaatttaagcagtttctctagactcgtacatagctaataccaagtactagggtatactccgtacggagcagaattcatacaattcccagcagaaaatgcaagccccctaattccccctaaccccccacttactttacggaattgatcactggttacctcgtcgcgtctcccagccattgcccgaccacctcggtatcattttagctcgagctttggtcattccaaccgattttccttccaagggcatatgagcgaatgtccagcctgatcaattacgggaaaaaatcacgaacgccctattttttgcactgagttttttgttgacaagtgctggtggggcctcgggtagtttgattttttggtatattttctggtatagttcacttgaccggtcttgtacgaaaccgagcatgaggaaagattttcttggatgatttgcgtatctcaatgactacatgtcagctgtggagttctgcctctcgcgaaaccgatccccttgcctaatacatatatgggtctaacgcatgtgggctgtctgacggacggttatatcaaacggtacagtggaaatccacaaccagaggtattacataaagactgacataactaagcttctacgttgtactcaagttctatagtgtaatattacttgttggattgaacttttggcccgcttacctccccgagctgcggaatggtattcttcgcttgggtcctgtatagatatatatatcacccttttattccaacttggtcatttttgcctttctagtgatcccaaagccggcactcgatcacctcaatcagctttcatatggtgtttctttggaatcacagtgtcgctcccgtccaactaggtctgttcaggctcttatcattcaaagtttccaaaatcaaaccatgaactctagtatatgggtctttcgaaagaatactgcatcgatctcaaatatctaaaagatacctgccgtagctcccatatgagctcgagctctagctgtgacggttggttgggtagcgggaggcagagttttcttctcctcgatataaatgggatataaatcactccagcacaaagccacttcttagcaagcatcgttgccgaaatcaactagagccgaaggttggctgtcggactgcgcgccctctgcaatataacccatatgatgtcagtaatcgacagagacaccaagtgactccacctatcgcactggtagcatataggctatagctcagaaactctggaggttatccatgttaactggccgttgacaagaagattagctcatccattatcgaggaaaggtagcgtctatatgatgagagatcttggaatatgacttgtcagggaagtattcaaatagggagaccatgccttggttgggacggtcctagagaattttgctaaatgcgtcgtcatgcaggcgcgccgcatcgctcatcgtgaagcatatactagctaactaggtaggtgcatacttcctgaaagcttttggttttgtttgaaactcgaaggaacgatcgaggtggggtcatagatttggcgtttcatcatgtatgcgacatgtcacatatcctaagcgcttgccgccacattaataattagcttgtccctcacattgtggggaggtattacaaatatgaaaatacttaagttcatatgtcacacatggttcactggcaggttatgcaacgtgaatcttaagaaaggtctacattgactgtcgttggaatatgtagctagctctggtgcatacttgattacgcatacttgattatgggagaggaaataaaggtgtggaatatcattcgaaggatagtcaggtagaggaaaatatctgactcaagacaggcagtgcacatctgctagactagatcactcaagagcggctagccgatgaccgactgttacagaaccagctgtgtgccataatttcccccgttgaatcaacacatacactcgaacctttcatttcaagcaaggcacaggataaaccaagtcaccaagagtcaaaagagaacatcgggattcgggaaggaagatccaacctctagtcaccaggacaaaggtgaaaggaaagggaacgagggatagatttgaaatcaagaactgattggtacttgaaaataaagaaggaaatctaaccgtcaaataaaaaggatatcgctcccatgaatgtgcctgatctgggggggtaaatgtggtcataagaaataaacaaaaaaggtgcaacgagcattggatttcgggcccagtcacacgtaaaacaaaataaaacttaagatacacagaaaaaaaaaaataatgatccttcgaataagaagccgtgaatatagacagatacacatagggaagtgagatgagagcggtggctctgctcgccctagtgcatgggaagctcatcgaatttcgcttggcggggtaaggactgccgccgaccaaaaagcgcttgcgatatttagtcgtagaagacgtaataggccttgccggaggtgacaccgacctgggagatatcgttagtatggaaatttgtacaccggggggtttcggaaaacttactgtgcagccgctgttgccgctgatcagaccgttggagtcatagaacttgccatcctcgtaacggcactcatcactgaggtcgtcaccctcaagcttaacgttgaagtcgagagccttggtggtggtaggggtgttggggaagatcgacaggaactttccggaggaggtgtaaccgacacccaggttaatgggagcccagttaccgatggactcagtgccgtcaccccactggcaacccttctcagtagacacacccttggggttgacatagtactgggcggaggtgaccttgccctcccagaggaagtagtcctcaccgtcggggcaagtcaggtcgtgaacaacaccgggaacggcggagagaggaacggtctcagactcggtaccggggtagtcagtacggcaaacggcaacgttgtcggacatctggttcttgacgtggacaccgccaacaccagggatgcaaagctgcttgtagttgtcgttggtgaggtagagcttgttgtcactcttacattggagaccaccaacggactggccggtgctaccctggacgctaggccactgggacttttggtatccaggtgggcaagcgtacgagcacatggcaccgtggtggcattcgtcaccagtaacggcagtcacaatgtcgctaatcacctcgtcaaggaaagtgacatactggataccggagtaaccaccaagacccaggtagtcaagggcgatagcaccgtaatccgaagggaagtcaccacagtcaatctctccatcagggaagtcggcggtgaggccggtggcaccagagctggaagagctggaagggctgctggtagcagcagcggctgtggtggagctagaggtggccacggctgagcttgtcgagctggcgaggatgatgacagccgaggtctcttggaggatggcaggggcaacagtagcggttgttgtaggggcggacgtggagctcgacgcggaagtcgacgtaggtgcggcagagctgctagatgggcaagcagcagccacggcagagtccagccactcaaactcatggtttgcgagaccagcacaggcttcctcgatactgatcgattgagggtcgctcgaactggacgggtccattacaacaaaatcatacacaactggaccggcggccgaagcctcggtctcagcagcgcgcttgtggacgtgaccgtgaccatggccgtgagcggccgcgaggccagccgtcgccagcgcagcaacggtgttctggaacttcattgtagtggtagtgcgaaactgttgatcataatgtgttagttgagtcaaaatccatgtgaagttcttcgtgttcaatgattccccttggtgtaaagcggcttggacgtgattcagtccctgcagccatatatcgcgtttgttgtgtttcgaatcgtctgtatagttcccaaccgacgctcaaaaacaacaacaacaatccacaccacatcacattgcgaaagctattgcaccatatagagataaacgggaaatagcacatacatcacttcaaaggtagtcgcgcgtttgtcggagtcgagtaaagaacagcggttttcaaatgaatgtggagagaacgaatccctcgggtgtgagaaaacttcaagaaaggagggctgtggttggaaagactggggaagaagaagtcagggagagacaaaaaggagggggggcgattcggtttatgtccaaatagcgttagcgtgatagtcacgggaaaaggggcaggtacgggatacagcttcaatatacaactgtctcacactgcctaccttggtagtggaccctggacggagtctggatgctacttgttcgcttggcagataccatttaatctttctaggggttcattctatatacggagcacttctaccgagtcagtctctctttcttcatctggggagttctataacggcatgatccatgggcgaggcagttcctcttttttgtttacctttggtccctgcggcttggcgccaaagcgagattaaactgccaggggcagccaatcagaggcacgtattgcacttttctgggccccataattcaggtacaccaatcagtattcagctggtctgccgagattccttgcgtatccatgggtaccagaagcatttgatgatgttcttcattttacttattattatgtctgctttgttcaattcttgaaaacaacatcattccaacacgctattgaagttactccccccttataacgttacagctctttgctgttgcatcctaggtaatcattgcagggagacgcttgaataagactttcaccccctggcagccggacaacctgaccgatctacttccgcccagcttttccaagacttacagtgcggtgtgcgtagccagcaaggggatttcccctgacgatgctagcgtttgccggttttattattccactttaactggacacacattctagcctagtaccaataataccaagtttaataacataccagatctgacctgctcaatgcgtcgcaaataagattcaaatatcagcccacgacccaagtactatacaaataaatacctagagagtcaggaggtctagaaaacggattattcatatcgttggtccgctgtacttcatgagtagactttcacctataatcatagcccgcagtgatgacgactccgcgcatgaactgcctaaattcacgcacttctccatactcctctagcagccgagagttgctccgcccatccactttttcgataatcggccagccagtggaacaatgataggcgagttacggagtagaagccgaccgacttgtcaatccgccgcaatctttattctactgtttggacggcacggcctggtccgcgtcatagcacgctctagcagacctctagaattgaatcgaaattacactaaagaaattacactaaatttattgcatcaataactacgcggaaaaccgacagcttgttttccatacaataagttcggctgaggcgggtgagcatctgattaagatattgcctttgtcttgacgtactccgtagtcgattcacaattgctacatgtatccaagtaagcaaccagagccaacaccatcacacctgccttttcgggtccaaatattcagctccaccgtcctccgatcattccgattctttcatctttgttttcagctggtgcctgctccaaaaattgtaacctccgtcaacccaacccctgtttctttgtttgtgcttgaaagcatgttcaggtatcatacgttgtataactatgatacgaagatgtttacgcagctctctgggttatgtacgtatggagaatattatagctatttcgacaaatatcataccgttctgctaacattcaagcaattttatatattaaaaacggggctttctacaatttggcttctcggggaccaccgttcgtatcagaattaatttaatttttgtaattataggctccattttcaattccattattgcggcttacagagtactaatgtggagctgcaatggatggactctcactagtagtacggagtacccaacattcattcctaatcgtgtgggttttcaatatctgttgtagttacagcatataatatagcatagaagtacggagtacgaacctcggtaataatctggcatcccacggtcactcccgacgtttggtcttacaatatatgatatattgtggatgtggagtttcgctacgcttacttctgtgtcttccgacgtgcggcatgcaatttcccatactcagtcacctccccatcgctgcacattcaaaacatccggcttgtttggatgctaaaatagggtcaagatgcctatcaacatatattaaaacaacggtttgatctacacagagatccaacacagttgtctataaatagttatccaagccacgatggacttggcgatcgattctcgtgagatccctttagtatctggagaagcgagggatttttccagggtgtaattgtatagtatttttagataattcggagaagcctaaacctgggataatcttcgagtttattccagctgcacatctggttacttgaaacacgtccatcagccgcttcgtacccttgcatacatcaaaccctgcttccaaaagggaactaagccaatcaatcatacccagagacatagtaaacaagattaaggctccgtagaatcccatgacctctgtatatatgtgagctgtggctggagagctacctatattatgtacaagtcgcgtcatttgattccacctcgcttttactcccatagatgatacaatatgctctccgcacggaatactgatgtcactatagtaaagtcagaaccgaaaatcacgcgtaagtcctcaaattacttaggtaggggtggtaagtagatgttgcaaactactatgtcatactcgagtcggcgaatagtacatcggcggactttgggcatagactatctcgacggtggccacggtcatcctactctatgtcgcttttctctttatttcttagacatggatatcatttacgagtcctatgagtcttcgaaatatactatcacgatttccgtatgggatatctaacgagcgaggttaacctgtcttcgatgcacatgccaatcgagattcgcacttagtagatgacagataggtgcagaattgttcatcgaacgtcatatttcgcccaatgtgcctccactgaggctagtgatagataaaaattggttgccagacttgatttgaatgctatgcggataaccgataacagcggtgcgataaggcctcaggcgccaactggggtctgccaagcacggatgaactgccaccgccttccgaatttttttgagtcccgatatgattgcgaaaaaattggagatgttcatcgagtctacaacttgctaaaatgggctcctctactactcaactcacctctaaggtgacctcgggctccccttaccaacttgacaagccccaggttagtaccaataactccccagagtcaatttcgcaaagtacttatcttatttcaattaggtcctcaaagcttccaccgcgctgttgaagcacatcaagtcttctcaacaggaacaggagaagaccaacaccaagaagaccctgattggcgacgatgactccgatggcgaggacagtgcgaccaagaacgaagccatctggctcgttctcaccaccaagcagcatgtagtggataagaaccgactgaagcccggaaaaatcagcatccctcactctctcaacacatctccctcgctcagtatctgtttgatcactgccgacccccagcgtggcgttaaggatattattgcggacccatccttcccccagggcctttcctcccgcatcgagaaggttattggtttctctaaattgaaggcccgctaccagagctttgagagccgtcgccaattgttcgccgagcacgatgtcttcctggctgatgaccgtatcgctatgcgcctggtgcagaccctcggaaagatcttctacaagtctagcaagcgcccaattcccattcgtatcgctgagatcgagaaggcggatggcaagcgggtcaagaaggacactaagaagaacaactcttcctccaaggaagagaagaacgcctctttcgcctctcctcttattgtcgccaaggagatcgagcgtaccctgagctgtgccgccgtgcagctcgcaccatccaccaccgccgccgttcgggtcggttcgtccaagttcacagccgagcaactatctgagaatattgccgctgttgtcaacggtctaaccgataagtttgtcgcaaagggctggagaaacatcaaggctcttcacatcaagggtgccaacactatggccctgcctatctggctcgctgatgagttgtgggtggaggatgccaacgtgctggaagctgcgcctgagactgaagctatcaaggactccaagaagcgcaagtccgctggagatggcaagctgctcgaggagaagaagaccaagaagaccaagcccgcagaggatgaggaggaggctgcatccgtggctgcgcggaaagagaaactccagcaactcaaggctcaggcgctcgaggacggtgacataagcaagcccgtcgcaacgaaggttggcggcaagaagaagaagaagtcaacttcatgatggttatagctcttaatgttctctgcatgtaaaggtatttctggcgtacaaaatatcacgtatctattgttccaacaatttatcttataccagtaattgaaatcaatctaacagtaggaatactaaagcatcgacatacaacataacagaggaatagatctagccttttttcatcgccgtcgcatgcgtcatttcgaagaacgatcgggctatatggccgccgccgcattaaccgagtccgacctcggggagccagtcttggcacgccgacgatagccacccaaattaacatttaccgcgaatcaccgagctttaatcttgctcttcttcttatgtctggaagatcaacgcaaaatcattctaccaagttgtcattatgattccaatcgctaggcactctgtcctgcgggctgcccgcgctcagctccaacccacccggaagcttagcctgcccacttcttcggcgcttgcccgcctcctctcgaccctcgccgtcctcgagcagcgcaatggaaagctggaatcttcgtctttttccgcagtcgcggctgcactgaagctcggtggctcagtaacgggcttcgttgctggctctggtgtgaaggccacctccgctgccgaggctgctaagatcaagggtgttgagaaggtgctggccgtggacaacgacgcatacgagaaggtaaatactctagcagcctctgaaatcaatttcggtagaaggagctttggctaacaattggatttcttgcatcatagggcctcgccgagaactatgcctctcttcttgtcgagaacatcaagaagggcgaattcacccacgtcattgcaggccactctgcctttggaaagagcgtgttgccccgcgtggctgccctcttggatgtgcagcaaatctcggacatcaccggtatcgagagcgaggacagtatgtgacaagagaaagaagtttgacatgtgatccggcaactgaccataatccagctttcgtccgccccatctacgccggtaacgcgattctgaccgtccagtcaaccgacaagatcaaggtgatcacagtgcgaggcaccgccttccaggacgtcgaggttgagggcggctccgccgaggtcgtcgacggagtggaccccaacgttcccgcgctcaccgagtgggtgtccgaggaattggccaagtcagaacgcccggagctcgccacagccacacgtgttgtgtctggaggccgtggcttgaagtccaaggaggagtttgaccgcctcatgcttccgctggcggattccctcggcgctgctgttggtgcttcgcgtgctgctgttgacagtggcttcgccgataacagtctgcaggttggccagactggtaagaacgttgctcctcagctctacctctgtgccggtatctccggtgctatccagcacttggctggtatgaaggacagcaaggtcattgctgctatcaacaaagatcccgaggctcctatcttccaggttgctgatgttggcctcgtcggtgacttgtttgacaaggtacccgagctgaccgagaagctcaagagcgcctaagttggtcgcgcgaatttctcttatgtatcacgacctatcgagtaggttggtaccttttttatctgttaaatgatcgtacagtataccatttactagaggatggaaccaagattggttggccaaatttccatcatttttgttctgattttagtgaaacaattcaatgctttaaactttacgctgaaccttgaaaagaatctagtcacaaataaatcattgtttgagtattgggtacacttgtagatacaatataagtcttgactgtaaaaggactttgcggccaaaacgggactagcgcgttctgcacgcgtcgcgcgtctatcagagggggattacatcggagaccattcaacgacatgaaatgtccgaacgcttgaatgcttccctcctcgccatcgttcctatcctcgtttgaccccgccgtttacctccactcggaaggacctggcaacacaaacccaccgtctgaatcattctccgacgatctcgaggcaattcacctgcaccgccgcgatcagacccgcaacggaatcgtgattcaacatcgagcgtggaatctatctgacgtgtttcgtagcgaagacgacatacaacccggttcgcaatctcaaacccgcattgcctggagtcgtggcactgacaaccacatagtagatacgccgacgaagaacgttacaaccccgagaccattttctcgcactcctactcgaaatctgtcttttatgccatcctcgccgccggtttcgagaatgccgttcatagcgtctccgggcgcgcttacacccacatctggcaatgcgaccaacgattcgcagaagaggaaagtcacaaattcagagggaggtgtgcagctgacagagccgaagcgccagcgcatagttggaggcttcgttgatgatgacgacgaggacgaagacgacctcgctgctttccgggacgagcagatgaagaatcaatatgacctgcccgagcactttattcaagagcctccggcggaactccctagtatactggcaccgctgccgacatctactaaattgaatgctacaattagctcttccaggataccactacacctgacaccccggcctgctccaatggctcccaagagattccagatcaagacttgtgccggcaaggcccatactgtcccgcaaaggaaggcccaggcccccgtttcgtataaacaaatgatcgccaatcggtcccagacagaaccaggaaaggcgacgaagagctattatggtatcgacatccacaagttgctagacgatgccgccaaggacaaaaagcccgtgaacaaagtccctcaaccacaagtccagcaaaccatcgaagcgaacaacatgagctcaaagcagaagaaattagactctgcaatgtggacagagaaatatcgtgctcgtaaattcaccgatctcattggggatgaacgcacacaccgagcagtcctacgctggctcaaggggtgggagtcaattgtattccctggtctagccaagtctcgaccgaagaagcctgcccgggaggatgaagaagagtacatccacaggaaggttctcttattaagtggccctccaggacttggaaaaacgacattggcccacgtatgtgctaggcaggctggctttgaagtgcttgaaatcaatgcaagtgatgatcgcagcagggatgtggttaaaggccgcattcgcgatgcattgggaaccgagaacgtcaaaggtatgaacgtggaggttggtgataaaaaggtccgccgtgccggtaaacccgtatgtgtcgtggtggacgaagtcgacggtgtcactggtggttctggaagtggtggtgagggcggcttcatgaaggccctcatcgaccttgttttgcttgaccaacggaacgcaaaatggtcttcggagggcaataatggcaagaagcgcaagggtgacaacttccgatttatgcggccgttgattttggtttgcaatgacctctatcacagcagtctccggcctcttagggcatcgtccattgcagagatgatcactgtccgtcaagcaccactggagaatgttgtccaacgagtcaagttcatcttcggacgcgagggcatcccctgcgacagtgatggggctcgaaggctctgtgaagcagcctggggtatggcgagcaaaaaaaatcgcagtggcaaaactcaggggtctgctgagggcgatattcgtagcgtgcttgttgccgcagaatttgtggcacacaagcttcgaaacgagtcgtcgccatcatcactcaggctcacgaggaactggctggagactcgagttctcaatgcatcgaccgagggtagcgcattcttcaaagagttaagtcgtgggggtgttcgtgagattgtgaaccgtgtgtttacagagggggctggcttctctgatgctcctgttggcatgagtttccaagatcgctttgatgccaccaacagccgtattcctgtcggtgtggcagatctgcgaaaacgacacgcaatcaaccgattgcgagaaatggtcgattccagcggtgatcatgaccgctgtgtatcggactgtttcgcttcgtatcccacccagcaataccaggatgataattatttttccaaacccaacgccgcccacgactggcttcatttccatgactcgatcagttcgaaagttcattcatctcaagagtgggaactgattccatacctcagccagtcggttgtcgcattccatcatctatttgctacagctactggcagaaccaccgacgacgataaaaacgatgatgacgaggaagctgaagagccccatcctttctcaggacccagagctgactttgctgctttcgaagcacaaaagcaaaaccgcgcggccatgactgcattccacgcctcgttttcggcacctatggctcgcattttccgatcgaatgaaagtataatcacagatctggtcccttacttgatccgcatgctatcaccagacgttaagccggtcatcatccgtggaaacggtgagcagagaagcaccgccaccgtccgcaaagagtccgaacgtgcgcttgtccagtctaccgtgcgtgtcatgaccgggatgggcgtgacttttgaaaaagtccgagtggaacatgagggaagccacggtggatgggcgtacagaatggaaccgtgagtgggatttcaaattttccgtgagacatacaaagctaacatatcctcaaacagaccaatcgactcacttgtagtcttctcaaagatcaagggtagcaccatcgaggcttcgggtggcacagcgccagtgcggtatgctgtccgccaagtgctagaccaagagtatcgcaaggcaacgacgcgcaagcagtctgatgccatgggcgcgtctagactcggcaccaggggtcccaggaactccgctgagacggccgcagccaaagcaatcagagaagcagccgtgaaacgggatttctttggtcggctggttgagcagcctgcgccacagcctaatgatctagacgacagctgggctgatgagtcgtccaaggctgggcggaaagtctgggttactttccacgaaggcttctcgaacgcggtccgcaaacccatatctatggcagagctgatggctgggttgtaatatacatatgcattgagttccgagttgccttctttgagcgtttgtcatcgtatgctggagtttttcccatacatttgttgcctaccttccataatgattactgtttttacgagttattgaataccaagcactaccacattgcccgataaatatttgaattgctttacttgaatgagaacataatttgagagaaagaacttttaacatagagatattcctctatttcaacaagacatttgaacaccaagcaaaccagccaaacagcccagattatgatcgttgaacatcaccataaggacagacaaatcaaaagacaaatcaaaagacaaatgcaaatcacaaattattaaacatagtatgtggtatccaaatcattccatcgtgaggcgaaggggcgaacacgtgcacccatgaatcgacgcagtatagcatcgaaaaaatccaacaaaccaagcaccaaaacagacaacgggaaagaagaaaagagcccggaagcatctactcgaggtatagcgagtggaccgagcgggtgtgatcataatcggcgcagaagtagatgcatccatccactggttcgaaaccacttagcgcaggctgaggtagctggcaagggcctcgttgtgtatcttcttcttctcaacctctatggcattattgttgggtacagagctctgggacttcgagccgagcgagtaccacttgtggctcttggttgatgcgtctgatgcattgagggttgtcgctgtggagacggtcgagtgggttgaggctgcgctcgatgtagtcttgcaagacgctttggaggatttggtgaacattttgtgtgtggttttgggggattttggaggattgcttgagaatttcttgacagcgaaggtaagacgtaaacgaaaagtaaacgagtatgagttggttcggtgtttatagttagcgagcaatgtgtgatgatgatgctgattttcagacctcaaggcttaatgctttgcaatggattggattgggaagtttctttttacggagatatcattgagtctttatatagagcttgggtgattcatttactccgtgtcaggctgccattccgagaagaaagaaaatctcaaaacgctgacgccccaccacctcagtcatagtatgaatacatcgagtctagaagcttttgcactgtcaaaggctggtaggacaacctaagaaagacgtcagtagtcacagccgcctcacgtgtggagccgctaatgatcggagtaagagtcggagttcgatttttactggcgagcggactacacgagggtaagactggtgtggaaaaccaaaatattggatgaataagtcggtcagaattatccaatgggatttctgagcgtgaaggccaagaatatctgataaatgaagctgcttgttctctggggcatgtgtatctatcctctagacccaaacgacgacaccgcacagtgcggagtcctaattcggtaattaattcgcacaccttttgatatgtaactcgtgaaggcttccaattttagaaggatcttgcgaaagggcgcagtcaattttcagtgattgtgcggctttgcatcttactagtatccacgtgttagaccgagctagcgcagctaaccatattcctatttcggagttgaggtctggatcttatccgaaggaatcttagataattctagacaatctaactaggcccacagggttgcatgttatttcagttatactactcggtacatagaaggcactccataatgtgcaagggtagctttccgctgaataacggcctgttttagaccctttagtgactataaattgcatagatgaatacaacataatatgtttgagaatgaatgcctagctgccaaggcgttacgatatagttacgaagtggcttaggatgactcaaagagcggggttgtttacggcttcgtaactttaaaaggatgaggcctttgaagatttgaaatcagagtacaaaggatataatgggatgattcggacgattacaaccgcgggcattaggagttagcacgatacagggatgtgctggttttaggtagtccgatgtagtccgaacatgtagatctttattccgatgctaaatttttagctcacccaatgtcctccgcggccgtcagctgagcaaatgttattaatccgagttccgagagctcagcgaacgtcagacatcagcgaatatcgggattcttttttaatatagtataacagcttctgacctaatgactaattattacataaagataatactgtaaataatgatcacggggtctctatgaacgtctattataagctatgaagacatcctagtgtgaagagagatctcgacattcgctaagacccctctgactagatagatggtcgaaaagcggattaacacggattaatatattttccttcacgctaaattagcggtcccatttcaacattcgatcagctgtaagccccttccaaaggtttgatttgaaatggaattcgatagagttagtctgatcgatgaggcttccaaccttataatttgatcagagccgggaaatttagagcgttagagatctttctgccatccgatctaattaatatactctcgcaataccgcgatttccgttagctatgagctcggaatcgcttcatttttgatatctttatatttcccttcattatcctcttagtatttataccaattgctcccgaattgatcccggttatgggtgagtaataaaagacttaaccctaaaccgaaataataattatagactgtgtcagcgtgtcttcctctgatgggagctgtagctggaatgaagtgccaatatacgattggatatgtcttgaacatattgataggatttttttgaatagacagataggtattaatgacattccaacgttccaagattgaaactcaatgtaagagattaaccatacggctttaggtcggtccatgtcgcggtgtttccgatccttcttctcagagcggttcttttcgcattcctttatgaactaaccgggatatccctccttggatatttctccttggcgttcattcttttgtgtaagatgtttgggcgcacggatacctataaccatggctacaagctgtgagtcgtcctagataatctttctgatcctgtggcgaaactttggatggtctgctatagcccgaaaaacttggatgttcaacgaattggccgaaagaaacacgcgtaacacgcgtaaggaggagaatggtgaaatcttgctaagggattggcacgttaagcgcaaatatttgacatctttgtttaacagaaaggacccaatggatgaaattatattagggggaaacgcagaaaccacgggcattgtgttactattccggacgaggggactggtgactcggaagtatgtaggtatatcagggttgaaaggtgcgaagttacaaagatgtcaaaatggtgaaaacttcaaagccaagtggcccaggcccaggatcaatttcctgatttgaactgatttgaacatgcaactagttaactacctaggtaggatgaagataactaaattagtcatcattagtcatcacctgggcaggtgacctcgggatagagacacccggacgttcgacttggcaacatcacaccggttctcgtcggttaacgcgaaggatttcaactgcctcgcaatgacgtcgaacctttggaccatttgtcagcttcaggttccacagtgccgtatgtacaacgtacgttgtaggacaatgaataatcgacattgtggggtggtgagggggatggaagcttgatttaagagtcccagtcctgatctgattccttttcctttacttctttatttcccaccttacaatccaaataaatacctcaccaaaaccaacaatgtcactcaagcctatcaccgtctacgggcatgccacgggccccaatccctggaaagtgatcatgatcctggaagagctggatatcccctacatccacaagttcataaacttcgcagatatgaagaaagagccattcgagtccatcaatcccaacggacgcgtccccgcgattgaagaccccaatacagacaccaccctttgggaatccggcgcgattctcgaatacttggttgacacatacgacaagcaaaacaccatcagctttgccaccggctccaaggactactacctcgccaagcaatggcttcacttccaggtgtccggtcaaggcccatacttcggccaggctgtttggtttagccgctaccacccagagaaggtgcaaagcgcaatcgaccgctatgtcagcgaaatccgccgtgtttctggcgtgctcaaccgggccctccaggggaagcagtatctcgtcggtgacaagttctcatatgtcgatgctgcttttgttccttggtatcagattactggccggtttgggattgatatggggaaggagttccccaatgtcgctgcttggttgaaactggtgcaggaacgtcctgctattgctaaaacggttcaggaccgggccgaggcctccgcgcagcagtagacgaaatcaacatgaggaggatatttgagagtggatagaaagaaatgaaatagaaattcacaggaatgcgtcggcgctcatgcggcctctgtccttgacaacgtgagactttaataatctggtccgaaatgatagcgttacgtgtaggaacataccattctctgcgctagtacgtccccagatagcctgccatgtcgtgtgtcgcgcgcgaaaagagggcgctgagagatgagaacaaaacatgctaagatttgtgccttctctcgggatatttcaagatccccacggcccctcgatttgccaattctacagtgctggataaattcagattcttgaacgaccactcgaagactcccgattgttgactgatagctcggcagctacatccgagccggataatcaatactggccatattttggaagcaaagagcagatcccaggatggctacgtgataatgatatattttggaagtccacctgatgcccacatattcttacaaacgatccttgcgtatatggcgctgtttacacatggaaacaatgaatatatggacccatcttctgggctcggtggcctttattgctgtaagtttcactccgaatcattccgtttcgattctgaaagacctgaatttcacccacggcgatatatttgcttttggatcattcctgacctcggcaacctgttttgattccacacgctaaagcctaagaagccactcttacaatatccaccatctctggggcaaaatgctgttgctttggtggctgcagatgactaccttcggctgcacaaaatctgccaagtcacttcgcagcgcacttctattgactactagccggtacctgaatcaaataattcactaaaaggcgctagcatagtatggtctgggggttcgagattttaagcttagcctagatatacagagagttagagaataaaacaggctttttgctcagttaacggctatacactgaaaataaaaggaatttccctaatataatcactgtagaatgcagaaatttgagagacatctaagaggtcacagacaatacagccatatgtcttttccttcaaatattgccttgtttgatgactcgcagaggccgtgaaaagaggataccagtcataccattaatattgcggtcaaaatagacctcgggagtgactgattcttccaaggtacccagggtacttcttctccatctcaaccatggaacgtacaatccgtctccaaccacggctcacgacactgaccacattatattgatctataaggaacaacgcttcttagacgtcagatggtatggtcattgaaagaaatgtccacctcaagcagcagcttggatacttgctgctgggaaagcgaccttggcccatattgatgcagccatcgaacaacagcccgtgatagtatataactatgtcatgtgaaggcatgctagttctacaaaacgccattactctccgtttacaatctaccagcagaaggcttcacttgcaaaagaaaaatgagcacaactccttctgctgcggggaggcctcagtggtgttgcataatccttcctttttactgttactgttacactcgcttcttttatctcacaggcgaaatacattaggtaagatcggcgcagaatggctcatgtcaatttcttcggtctttgctaggatattcactcttctgcacatctccgctgtctgaatgttcggtaattcccgagttttacttgcatacgtttgattgtttgccaatcccttcatctatcacagacaactccaatctattatttcatatcatattaattgcagattagagattgaagaccctgagatagccgtttgagccatttcttcagcgccggtggtctccggtggccctggcatgttagcgccgaccccgcaatttcgttcacgaatcatactttgtaggagatcaccgtgttcttatctcctgacaacctcttgcatagatcttcttttttggctgtaacatcggctggcttcatggcaacgggactcgcagcaagtggaaaccgccggcactcgagactatataatgtagttgggttttcgctgaccttcataaacaaacaccccgcgacccactttggtctgtgacccctttgaagttttccaacaatggtgtctctattcaggattgctttcgtcaccttcggggtgattcatggcgcaaatgcgtggggcgtactaggccacgcgactgttgcctatgtggcacaacattacatttcttctgaagccgcatcatggtaagtcctccgaaagagcttccagataaagacagtatccaatgctaatctatttgaagggcacaagaaattctcaatgatacttccagctcatacctagcaaacattgcttcttgggcagatcaataccgcctcaaagatgacggcaaatggtcagcccctttgcactacattgatgccatggatgacccgccaacaagctgcaacgtggactacgagcgcgactgtggagctgaaggctgctcgatctctgccattgccaactatacccagcgtgcaggggatagcaaactcactactgccaataccgccgaagctctcagattcctcgtgcacttccttggcgatctcacgcagccattgcacgacgagaactacgaggttggcggaaatggcatcagtgtcactttcaacaactactctgacaaccttcattcggactgggatacatacatgcctgtacagctgattggcggtagttcgctcgccgatgcgcagggatgggccgacagcctggtcgatgaaatcacttccggcacctacaaaaagcaagcagcgagctggatcaaaggcgataccatcagtgatactatcaccactgccactcgatgggcatcggatgccaattcttttgtctgtactgttgtcatgccggatggagccgctgccttgcagactggcgatctatacccgacatactacaactccgccatcggcacgatcgagctccagattgctaaaggcggctaccgactagccaattggctcaacatgatttacaagcagaatgttgctgctaagaatacgccagggaaattcggcaaagggcaccgacagcctgaatttgtccgcgagcctcaccatgagcctaataagatgagccgcgcaaatctagctagagctgctatgggaggatcttgctgcaaatcagaaggacgtgagcatagccattgatttaatggcatttgtagatgttgtggattcagctgtctgaagccagccatccttgttaggaccattgttgatataatattactagctacatagacatcatgccttttctttctcgctatccattaattttccttttatctgctataaaaacatacaacagcacgtctaaggtggttgtcgcctgcgtccacggttcgggcacgggtggctcgccgctctatctagggcaattagggcggattatccccgttgcgatgtttgagtcatcaggcttgtctgtcatctttcttttcagcttggaatgagcctattttggagattcattatgatgagaacaaaaataggccaagtttcaatgaagtacagcaagttacatttacctattctgatcaaaaaaagctgtaatatcatctttcccctctgctttccactctccagccccgcttagcaagatgtgtactaagcaagacttaggttcacggataacttgtgcgcgctattatatatactggtcttttggctgagcggaagagacgtgcgcaccggcatattctttacaccaaattctatacatttcgcttcccggtttaatattcaaaggttattagttaacgtagtccacagccgagccggctataccagccgacatcacataataagtgcgatgaattacaacatgatatctcaacaacggtggcctataatagacttttgtttcagcctaatgggtttatacgaagtccagccttttttttaagagaattctagaaatctaataattcagtgattatatttttagcttttagccctgtattttcaaacacgataagctttttactgatcttacaattatactttttcacccaaactagttagattgtgtctcactagtctataatacgctttcgttccagaccgacataaactttcaagagtaagacaattaaacagaccaatgagatatgattctacttattccgaaaggcgattgtgtgcacgcttcagacacattactgtctggtgggacataatctagacgtaaatgagcgcgaaagcagcgccgagtacagccatggctcccttggggccgctgagctgagatgatgcagcatcagtcgagggtacagcggaggcggaggcactggtggatgaagagtcggaagaggaagtggtggaggctgcgatgaaaaagttgtattagtatgattgccttgtaaaattgtgcggagatgcatcatgcctgaagaagacgaaggatcagtcgacgacgtggatgtcgaagacaccaaggatgtaagggtgggggtgacggatgtaaaagtggtcgtcgcggaagaagaagtggtggtggtggtagtggaagaagaagaagtggtagtagacgtagaagaagaagacgtggaagtagacgtagacgacgtggaagaagacgtggaagaagtagaagaagaggtggaagaagacaaggatgtagtaccatcatctgaagcgcccttcttgacagtaaaggtgtcactgacggcgagctggcccccagaatcaattatctggatctcgtagtcatctctaaggcatggcagaatggtattagtgttgttcttctctgctcacccaccctatcttctacatacccgttggaaatgctagggttaggctgggtcgtgtattcgccctcagaggtcttgacgttatccgccaatttggtctggaaggagccatccttcgatctcaggatgatgctgattaccgaagggtcactagaaccgctagtgaatttgatagttttggcagtggagaaatcccacaccgagtctgacgagggagcggtgacggtgatggccaaagccgatgagaggaggctcagagcggtgatgatgaatgagtagcgcattttgattgactggaatttctgaattgcttgatggcgagctgatgggaatgtccactatttcttaggataagactatataggaactagattgttcgaagatctatatacagaaatcagtaactttcagccgaagcccagcgcattgagaatacgagatagtaatccaaaccttgcatagaagctgaatatgatatgaacatgcgctgagcctcttgtggagacactgaaaaattcaggggtcattctggtgaccacgtatattgtagggtagcaacgaatgggcattgctaagatcatcactgcaccagcgacccgtcctgttgtgttgagggtccatccaagtaagcattgcaccttatctttccaatcaagtctccagcacgcatcgtccttgctaataaagggttaaacttaggcgaccagcatgtcagcgctaatttagcgtttgggggtgcagcagatatggagtataccgacagggctcggaaatcgaggttatcataatggagatctattttcgttgtattgtatcgtcacttacagccgagaatgaataccggtcatgactggtaatattcatcagatgagattggtaggtatgccgtcttactctgctgcgcccaatgttcaaaagcgattgtcggaattcagctccaagtacggagtttctatgttggaccttactgtgcgtagccagacgagaagcggtagagttgaggtttctaattagggcaagttgcccgaatgaggggtgggtgcctcaggccactatctccattctaaggttctatggagtagctactcaacacatctcctatgttccatggtaattcacgaggtaatatgaaagcaatagaattaattatacggaggatctagtctatagtaaaaccactgcataaaccatcaaacaacgtcaacaaacaaaatcaaaaactaattcggacaggaaacataattaaagcggtaggaatggcggtctagagatagatggaaacgaaggaggtggtcaatgcgaccgtgactatcatctcccacgacaagctgaataacgaaaccccagcgccggtggaagcctttggacttgctgcggaggttgtcgatgttcgggtgtgatctccacaaatattgctgcttcggttcaggctttcagtaggataatacacccgaggccctccatccgagctgaggtccacattgagatttccgcttgaatcggtcacatatgttttgcaagacaagagctcgctcacattctgtccggatgaaaatcctgtgccgtcggagccaagcgtgattttcgtggtagctttgcgggatggcttggctcccaggttggacacgacgctcacaacctggttaccggcaaatcccttgcgcatggccaaaatgtttgttgaattgtagatcggcaatgagaggtatgatagatagtcgacccctgacttcggggcgaccgtagacttttctccgtcaccgcttgcatatgatctaatgcgattcaacgattggactagcgaaggtagggaggtcgagtgcattgagtatttggtaagccatagggcctcccggttgacaggattgaatccacctgacaggtgctgttcctccccgtagtagactgtgttgcgtttattagtatcgttggctttcgtttctgttcgagggggcacaacatacggatggggataccgtcagcgagcatgctgattgtgagaatgttgcgagccagctaatcgggagcgacaaagtcaatgcgtgctgacaaaatacccgatgcactcgacttaccgatatgtctgaagtatacgagccaaagcgagcgacatcctgattcgatgtgaaagttcccaggggcagtacgtcctcgcactgtttcctgacgtaatctatagactgtacgattctgttcaggtctccgtcggtcgtgttgaaagcctctgtgaggatataatacctaaaagtgtcaacacgccctccgttcattttgatgaggtactcacaacggataattcaaaagtccgggtagaccgggctgtagagaacagtaaccggatgcgtctcttgtggcgccttcgcccatagtaaaaacaccggccgacttggtgaaattggagaagaagacggggggaatgttcaagacactgtcgattcgcaggccatcaactacaaagaataactgttattaaattccttggagacataggagacacatagacatactggagtagttggaaaccaactgcgaaatccaggtgcccagcatctgctggacttcctgatcctcgtttcgcagatctggaagcgatatggtcgtgtctcccatccagcactgataaaggcttagcaatgctctcacaaatgctatgacagacttacatccagaacacaggtactgtttacggggtcctcagaaagtagcttgtagtcgtggaaatacttctgatcattgaatggattgaacttgctgtagtcgatagtggaggcatttccagcccaggccatgtcaccaacgacaatatccagcatcaagtactattttatatgtcagttttgggagtagacatggcagccggcgactcaccatgccacgcgcgtgcaatgccgcggataacgcttcgaggtcatcggaagtgccaaaatgggagttgatggaataaaggtcgtttggccaatacccatggtatgctatcatccatcaatcgttagttctctatatccgttcacagtcaatatgaccatacctgagagatccgccgtgcgagttgactcctggctctgcactggagagatccagaccgcatcgaacccgagttcctgaatgtaatccagcttattgatgatgccctgcaagctccctccacaatactctcccagagctgcaacacaaggagcgatggttgaattatcggatcgagcgaagcgatcggtgaccacttggtaaacggaccgaccgagccattggtctcgggatgccgcatgtactgtcccaatggcggcgaccaccaaaaccttccaccaccacattgtcagtggcgtttgcatgacaggtcaaaggtgaatcaaatgacggatggattcagagacaatgaaaaggctacatatgtacttaaatttattgacaatgccatataggctgaaaattatttacggtgaggtacgtgtatcttgtaccgtatgtgtaatacatatcttaacgatctgtattatgtcggcccgatcggcaagctttgctgatccttgaaaatcccgcgaactcatcgggcacatattgcttccgagggacggagtggccgtgaaggaaagccaaaaaaaaaagcaataatacgagacaacagcaataagccaccttatcgtcatatccaccctttcttataggtcagtcctgtatcaggtatgacgtgttctatcatatattaggcgggatacccgatctggcataatatacactttatgatcttcggcacgactggtctagaaaactcgtatagctttgcagcaaacacgtatatcattctccacataagcaagctatcgagcaaagacccacttcgtatattgggttcagggctgtggaccactccgaagatcctataccgatgcatgtcagcttgcgatctattgtccagagttatgaccgctcaatcgcttagcgtgagtatggatatgctttactgtggattgaggctgtatagcaaggctggatcatgtctccagtggttcgcctaattcctgcgtctatgctgattagtattgaatcaattattgcattggcctggacatctccggagttttcattatctttcacatgcttctcttgcgcatatgtgccctatgaatcgttcactatctttccttctatgagttatcgcattcttcttggtatgcaccctgtggttttttgactgcagtcgaggctcgaacagcgtgttctgtgaatatcaccatagtggcattcactgtgcggaatggagttgctcacttccatcactcaataccttgccattgttgcaatatatatacgcattgtacaatcattgccatatcttccagaggaagcagactggaatctcaatcaaaatcagacagcgacacatcccctcgactactcgggtcggtgggatgaccacacatacaacccctcgccagagaattggcgattcccgttttacacgatatttctcgacagatttgtaaatggcgatccgagtaacgataatgcaaatggcacacagtgggaacacatcttgacctctaacgagttccgccatggcggcgacgttcttgggttggttgatacgtttgattatcttcaggggatggggatcaaggtgcgcttttttgcttccggaagattggacgtggaaaatatattaaccatatccagggcgtctacctcgctggaacaccgtatatcaactttccctgggccgcggatggatactccccgctggacctgaccctgctggaccaccactttggtacaattgaagattggcgcacaatgatatctgaggcacatcgacggggaatttatgttctttttgataatacctttgcaacgtatgtgggatctatctgcgcaacctccgatgtcgtctgctgattttgcacagaatgggcgatcttatcggcttccagggtttcttgaacaagtccgcgccgatcaatcccaacgagtatgactctgtatggaagtatgaccgtcgatactgggactttcagcctggaaatgaagttgagagtgaatgtccctgggagtatcctcggttctggaatgacgacgggaccggtttgaccaccacaacccttggtccttcatgtcgggatagtgaatttgatcaggtaacattccctttctttcgacattgaacatgactgacccctacagtatggagaagttgccgcctttggtaactacaccgaatgggaaggacaaatctccaagttcgcatttgttcaggatcgtctacgcggatggcggccggacgtgctagccaagatcaaacacttttcttgtctgaccatcaccatgcttgatatcgacggatttcgcgttgacaaagctctacaagttacccttgactctcttggagaatggtccgagtatatgcgagattgcgccaagcaggtgggaaaggacaatttctacatccccggagagattgtgggaggaaactcttatggctcgctttatatcggtcgcggtcaccagacaaatcaaaccatctccaatctgacggaagcttttatgatgacgaacaagacaaataagtcagatgaggatctcttcttgagacccgcggagaggtccgcattggatggggcggcgttccactacacgttatatcgtggtctgagccggtttctagggttagtttcttcctttcaccactttcagtttactcaagctaacatcgtcccgttcagtctggacggcaccttcactgccgaaggtgacccgcccgtcaactttgtggatacctggaatggtcttgtggagaccaacgatatggtcaacacgaacaccggtaagttcgatcctcgtcacctgtttggtgtcacgaatcaggatgtcttcaggtggccagggatcaaaaacgggacccacaagcagaatttgggtctgtacatcgcttcgttgctcatgccgggaatccccatcctctcctggggcgaggaacaggatttctacgtcctggaaaaccaggctgacaactatgtcttcggtcgtggacccatgtcatctgctcaggcatggcagctacacggatgctacaaactgggatcatcgaaatacgttgatttcccgctcgaccgctccctgaccggatgtaaagatgattccgtcagtctcgatcaccgcgatccttcacacccagtacgaggcctaatcaagatgatgtttgagatgcgtcaaaattatcccgctctgaatgatggctggtaccttcagcaattgtccaaccagacgttcgacatctaccttccaggtagtggtggaacaccgacagagacggggatgtggagtgtcatgagatcgcgctttgcggatgcgcagaatttcgatggccaaggccaggggaaccagagcgtttggctggtgtattctaatgacaacaaaacagtcgaacacaaattcaattgcagcagtaaggatgctttgatctcgccattccccgcgggaacaagggtcaaaaatcttttcccgccgtttgaggaattgacgctggccaacagttcgactaggcttgggtatgattgctattctgagattgattgctgttactgacaatgagcagattcgaagggtctaaagttcccaacgggtgttatcccaaccttactatgccggcctggggtttcaaagcctttgtcccgaaggataacttcgtccagccttccccgtatgtaacccgcttctccccagggcatgacgctcggcttgtgccccagggaaaaagtggggatacagttcgaattggcttcgaattctctcaggagatggactgcgtggatatcacgaactcgctaacgataacgtcaaaagcgcttaacgacgagagcccacaacttgacactacctcggtctcttgtaaaccaattacagagactgatgttgtgacatggcccggggcactcactagcgttttcagctacgaagtagatttgggcaatgtcttcccaggggttcacagagtcacacttaccaatgtgactacagcagatggaaatcaatccacaggtgtgagtaaattcctcgctatacagattaagaaagtctcaatactaattgaggcagtccgttgaccactttcttttccgtatcggagagataaacaatccgatggtctggccacagttggccaactacagtagaacgctattgttcgacaacccgtcgtctgaaactgaacccttatcagtaatgccacaggcccctggtgcagacatgtggcgttactcgctggattttggagctacattcagtaactggatgacatacaccggcttcaacacttcgatccccggcaaaaactggtccggcactgcgaagcaggcctgggaaggagaacacatccttgcccaatactggagcaagttgaccggaagtagcgctcactggcaacatggagacacgcaatgggcatacaagcccccacgtcgcttcccaaacctcttcatcgaaggcgagttcaaccagttcggatatgacgctggctattccaacaaaatggctctcagcaacgtaagtggccagtgggaaatccacttcatggctgaatggcccgtgcaagttgcattcaacgcctgggggttgaacgaagacggcttgcccgatcagacacaggtatttggggacattgacggagacaatgtcctggatcaggtccctccagtcacgcttctgagcaatgtgttcaacgttacaattccacccccttcgccctatctttccttcaagctatcggtgggtgacggcgatcttagggtctacgctacgcctactggatccaggtgggttcagctggccatctttattgtgctagcaattgtgcctgtcgctaccgctctcggcgcggtttttgtttatctgaaggccttttaccaggtcaaattcaatcaagtcggtgtgaccgagaaaagatcaagtttcgctccgctggtgagtccactggtgagcgtctttcaaaaggtggctcatcgatctacgaaccccggacttgccctcaccaatgtgggcccgtttccatctgaaaatggaggcgtcgttggtgccacggtaaacacctgccgacgaaccgtgctcattgcaacaatggaatacgatattgaagattggggcattaagatcaagatcggtgggctcggtgtgatggcccagctgatgggaaaacatctagcccaccaggacctcatctgggtggtcccttgtgttggaggagttgactaccctagggacgaccctcgtgagccgatggtaatcaccgttcttgggaataactaccaagtggatgtccagtatcatcagctgcaaaacatcacgtacgtcttgttagatgcgcctgtgttccgagctcaatccaaatcagagccgtaccctgcccgcatggatgatctggattcggctatattctattctgcttggaatcaatgtattgccgaggccatcaagagatttccggctatcgacctctatcatatcaatgattaccatggcgctgctgcccctctctatcttctacctcacacaatcccatgctgcctatctctgcataacgccgaatttcaaggactctggccgatgcaaactccacaacaaaatcaagaggtttgcagtgtctataaccttgaccatgcattggtaaagaagtatgtccaattcggagaggtgttcaaccttctacatggagcttccaactatctgaaaatccaccagaacggattcggcgctgtcggtgtctccaagaaatatggcaagcgatcgtacgccagatatcctattttctggggtctcaagaacattggagcgcttccaaaccccgatccatctgacatcgccgagtgggatcaaaacgcaaacaacaaccccgaagacgttattattgacgctgagtttgaagccagtcgtgccgcactcaagaaacaagcacaagaatgggcagggcttaaagttgacccagaggccgagctgtttgtgtttgtcggtcgttggtctatgcaaaagggcgttgatctgattgcagacatcttcccctccattttagacgcccacccaaaggttcagttgatgtgcattggtccagtaattgatctctatggaagatttgctgcgttgaaattgaatcgactcatagatctctatcctgggcgagtcttttccagaccagagttcactgcactaccgcccttcattttcagtggtgcagaatttgccttgattccttcgcgcgatgaaccgttcggtttggtggccgtggaattcggacggaaaggagctttgggcgtgggatcacggtaagacttacctggcttgaatctaccaacagtgctaacttatgttccttttttagtgttggtggccttgggcagatgccaggatggtggttcacaatgtgagtttccttctctctctctctctctctctctctctctatgttcaaactaacacattctagcgagtctatgacaaccaaacatcttattcagcagttcaagatggccatcaatgacgctctgaaatcgtcgcaggagacacgagctctcatgcgtgcacgatccggcaagcagcgtttccccgtagcacagtgggttgaggatctggaaacgctacaaaccacctcaatcaaaaagcacgccaagtactctaagcgccacgatcgtggttcatggagattttcccgtggcagcactcttgtcccagaaagcatccctaaagtctcgccgagctcagacaacagccgcgaacagagcagatcacgcggctccaccgtatctgtcccaccgagtaggccgattacgactgagatgagactgtctggacctcgaccaggccttgactatgttccctcgccgacaactccgtctttcagtcttaacatgtccgacaacgagcctgattctgacgccgacccaagacgcagacctttgtcctccaaccatctcacagactcgcgagtcgtttacacctcggtaagcgatggagaagatctcgagcctatttccggggacggcaatgatcgtctatcgccatttaggacacctaccgtttattttgctcgatccggtgccagcacaccagctctcagtgcaggatcagaagacggtgtgctgggccgaagagatgcaagggcgtctatgatgagtctggtcagcgtggatgatataacaaaggagaaacaacactacaatctccagaaagttgatccatttttcacggatgtgaataacgagtacgcggagaagtttgagaagaagcttgcaggcctgaatggcaagaattccgaagaccagctctgcatcgaggagtttctcgagaagagtgaaaaagactggttcaatcgataccgcgacgtcaagctgggcaagtcccccttgccatctcctgctccctctgtctttcgtttcaaggttcatgaaatcggtcgctcagagaccccgccaattaatggtccaggtgcaaggcccaatactgggcaattccttctcccaaatgactatgttccccccacgggtgtgaagcgtttcatgttgatgaagctgggtgattggcctgtgtactccatcttcctcgctattgtaagttgaaaccctaccaaaaaccttcatcatagccattgacagtattattcagggccaaattctcgccttgaattcgtaccagatcacactcctgaacggtgagattggagagacggccgagaagctatacattctggcatccatctatcttgcctcttctatcatatggtggatggtcttccgtctagtcccctcagtctacgtgttgacgattcctttccttgtacgttcaagttcctctatccagcttacggggttgcaagctgactagccgcagatatacgggctcgcctttctatttgtcggtcttaccggtcacatccaaaacggcacaagtcaaacatggctacaaaatgtgggagtcggcttgtattcgtttgcgtcttcgagtggttcgattttcttcgccctcaactttggagacgaaggtatgcaccaactcttctaggaaatatggaacttatctgactttcttgttcaggtggagcgcctctgaggtcttggatttacagggccactgtcatccagggcacccagcaattgttcatcagtttcctttggtactggggtagctggatggcaactctcaatcaaaaaggtagtgagcaattcagccttgccatgaccgatccaggtgctttgctcggaatcggactcggactcgcctgttttatgtggctgttgggagccctgatcttctttggacttcctacatattaccgacaagcaccaggtcaagtgccgacattctacctatcgctcttccgtcgtcgcattattcttgtatgtctcttccagtcccccctcaagctaatcttgattctgacactgtattttgcagtggtttttctacatggtgtttatatcgaactactggctgtcggcaccgtacggacggaactggctctatctctggtccagcaagcatgcacaggtgtggcatatcgtgctccttgttctcctctttttcatctttgtctgggcggcagctctctgggtctttcacgtcttttccaagagacacgcctggtttatcccgatctttgctgtcggtcttggtgctcctcgatgggcccagatcctgtgggcgacctccaacatagccacatacatcccctgggccggtggtcccgtagccggagctatccttggtagagcgctatggctctggctaggagttttggattcccttcagggtgtcggtaagttccttctcgcggcgaataaaacgtaacaaaaactgacttacgccaatacagggtttggaatgatcctcctcgtcacaatgactcgattccatgtcaccttcacacttctagccgcgcaggtggtcggttccgttgcgactatcctcgcccgcgcgacagcaccggataagttaggccctggtgatgtcttccctgatttctcggctggggtcgcagccggcttggaaaaggcagacttctgggtgtgcctgctcttcatgctgtccatcaatgtgctctgcatcttcttctatcgcaaggaacaacttgcgaaaccttgactggcgttttcttttctttttttctgctttgcatccactcaacattgtgaggcgtagatattgtgatcagaggattaattatactataatcggttgcatttgctagggcgcgatagaccttgtaaaggtcggcccttgttttggatatgtacataatacaagtcaggtatccaaatttaatgttcatattcatattcatttggtgcttaataggcatcgatgcttctagtcctaaattaaattcattaatcaataccttgaagtggtttcccttggttggacttcccttattctgtcaagcgggcgtgtcccgatcgcgcgaaaatcaacaatatggaacggtacagcctacgccggtttaggactagtccggggaaatgacttttccgagccggtactccgtatatattagtcatctgttattcccgcttctttcattccgatcgcttattccaatggtccttcttatgggccctatgcaaataatattacataagattcaataagtaactaggatagtcatgcaaagtttaggctttaggcccatttgcccactttaatgggccgagtcgactttgggtctgcgggagacctttgattagtgctcttgccaatatccgggcccatacccatttgccttgcgataaattatgacataacagtcatgtccacaatagttggcaagcgcaagcgtgcaaggaaggcatgcataccttgccaccagcgcaagcgaaaatgcaatggggagtacccttgcggcacgtgcaccacctatgaatataactgcagatacgccgacgatgacaccaccaacactgcgggtaaaaacgaccatactccactcctggacaagcgcatcattaatgacggcgggagtactatggcgatcggtgtcaccgccgaatcgcgcagcccggacagccaatcccatggagcgagagctgccggagctgacagttcatcgtcaaagagttctgccgtcggggccggcatcttcgacgagcagaagtccagatacactggagcatcggcagccatggccttcccgcacatcctgggggtggcttttggcgccgacagccctccaaagatcaactcgttcgcgtacaactttgggatccgccccgaagaggcttccaacgcgtatggcttcctagggaaactaatttcagaagaaaatctcgccttctactcaaatgtgtacttctctgcaatgggccctatcggcgactgcttggacccaagaatttatgcccagcgatgtcgcgattattatcgtagctccggcagcaacgcggtcgccttcagcgccgtagccgctggtgtcgctgcttgcgggtcgttcctctccacaaccaggtacccgggggagtctgatctactgcagtacgctaaagctattctcgatgatcctggatctatacgcatggtaagcatcgaccatatcgtcgcgtggagcatgcggttattttatctaagggccacagcccgccctagtaatgcttgggtcgcatcatgtactcttatgcacctttgtgaagtggttgggttacacaaagaagagaatattaaaaggatggcgtctgctgccggtgctgctgttgttgggcatgatgcggaccggctaaggcgaattttctggatctcatgggccgcacatcacatgctgtcgtatgagtacgatcgttcggctgtaacatttgggaccgtgacttgtcagcccatcatctccattccggggtccgttgccgaccagttcgtgcaaatagtccagatcatcccatcgcctaactcgccgttccagctcgaaagtcagcctccaactccgagggaggagttgttccagcgtctcacggcattgagtaaactctgtttcactcatccgttcctagtggtgacgaaggcggaccttgcgttttgtttctatcgacgcatttatcagctcaagacaggcgtgacagacgagataattcaacacgtcattgatagcggtaacgacgcagtgagagcggctgagaagctagccaaccagggtcgtctgttgtggaacgtcataggcagcgtcttccagtatgtctgtgtcttgttggccatcgacacgccggcctcctccgctcacatccctgccgcgttcaaagggttggagaatcttgccagggcaacagacacaggatcgacccgtcaggcattgtcaatagcacggcatcttctcagtctcaatatagcaaagaagcgaaaagagcttctgcagcttgaagctgtggagtcgggctacgaacccttccaggcgcagccggaacccgatgccaacgctgcttttacggacattggctggggtatggactgggatcagcttctcatcgagccatatctatctattttcggacccgacatccagctgtagtagcgcaaaggggcattgtgaaataatccactcagcggcgattcaactcattaaaccatggcgtggcattctataatggtctaggatgaaattcagtgttacatttatgtaaaattgccattgaagacatctaaacaaattcttcctgcgtttcgctcttttcctgctccgccctttctggcgtcatggactaatgccgctccacaaaacagaaaagcagagccacagctaaacccaggccagagagaccgacaccgatatacaatacgccgcgatatctttataggacatccttcccattattattgacctgcccctcgaccgtgccggcaaactgtcgactttgtgctttggatcatatgccaacgagcggctacggagtatatttattcgattcgtgctccgtgaggctagaggctgagcccctgcacaaatcaataaagctcctctttctccacatcgtgatcaactggatcatctaggccgtaggtatgcacggaggtctgttagtcgggagtggactcaacgccgcttcaatgttggtgcagcggagcgggtctaactatggcccccaatgtgcggctgctgcggccgagatgtgcgggatgaccatccttaaccccgacggtatctccctcattatggggcttggcattttaacaagtacctttggcgctaatcgccgcagttgccgcggctattccggagcggcccagaacttaccacagtgcagctgcgacggtgacggtcatgcgcgtgttgcgactcatagtgggttgatctggcctacgggttcgggggcgcaagtatctctgcgcgaatcaagttcgaaggtctggccacatcaatcccgatatgcgagctgcccggaggataaatagctgcgcggaattagcgtttcggaattatccaatccgatcgttgtaactaggctgagatggagagaatggcaacaaagtttggctctgcggcgatttcgagactgggcctgaagtgtataaatggacaggtattctctgctccatggaagatttgccagacacccaggagctcaaacggcaacagctacaagagctaccatacttcggacaccacttttgaccacaatcacaacaatcgatacacattgaatccccaattcaaaagaagattttcaacaagagcaaaaatgcctgagtacgccaagaaccagccagccggcttcaaaaatgccattgagagagtcgccattgtcggtgtaggtgtatccctccagcagcagccatgcacaaaaattaacaaacgtccttaggccggaggcactgttggatcccacctcgttgccgctctccttaaaaccggaaaacacacggttacggctctctcccgcagagatagtagcaacaaactccccgagggcgtcctcgtcgccccagttgactattccaacgaggccactattgtcgctgccctcaagggccaggaattcttcatcatcacagtatcccccactgcgccccgcgacacccacagcaagctcgtccgggcggccgccaaggctggtgttccctacatcatgcctaacgggtacgctggcgacattgaacacactaaactcggagaggatatcatgctcggtcccgttgctcaggctgccagggacgagattgagagcctcggtatgaagtggatcaccgtgtgctgtgggttctggtacgattacagcttagcggggggtgaggcgcgcttcgggttcgactttgacaagcggtctctgacgatctatgatgacggcaccaccaagaactcggtatcgaccttgtcgcaggttgggcgcgctgtggccaaagtgctgagtttcaaggtgcttcctgaggaccaaaacgacaagagccttactgtgtcgcgatggcttaataaacctgtgtatattaagagcttcgtgatcaaccagaccgagatgtttgagagcgtcaagcgcgtcacaggcactagtgacactgactggactatcactcatgaggatagtaagaagcgatacgcagatggactgacaatggtcaagactggtaacatggctggctttggtaagctgctttacgcaagggcatttttcccagatgatccgggtgattgctcggccaaggcacagaatgagctgcttggtctgccggaggagagcctggatgaggctactcgagctggggttgatatggtcaaggaacttcagcttcgtgttgagcgtatggcgtcatagaaaatagcatctgcagggggataccattgcaatgcaaacttgacatgaatagaatagaaaagggacggagaatgaaaatgaccctgataaatttaggggattgttataccccctggtttaattctactttacagactccgtagtcaaaaagcccctacattttgatcataaaaaacgtgtatttcatctcatacctacatgtttgaatcccttgatgatgatggagcagtttttggagcagattttgaagtaattgttgaagtagttggtgtgataaaagtaacttgattttgttgatggtttatatacaaattgtgggtatctaccgtcctcaagttggtagggagttcaatactaagccggtgtggagggcggtatgctgaatcaggcagttggggggggggtcgaattagcaattaggggggtccctttaacagtcccctaactataaaatcaccctgaggcataaatagcaacgcagacaccttcaaccaccttctcttcttcccatcccatggcaattccgaagccaagaggtgaactcatggagcgaagatcaatatgagcttcgtcaatttgctgtacacaatctgcttattactgccgaccgatttaaagtgggacagtatccagccagcatcatctcaatttgcatatcggtgaggctatcacgattcaccgggtagcatcggcttccggggcctcttcagttaagagaatctcttgtttactttttcctcttctctatctctctgccatctcagatactcatcacatgggtttcaccaaatgatcaacccaggatgactcttccaacttcctcctacaatcctatcatctttttacggcaagtcttctggtggaggcatagacccgtacccatttgagggttcatgaagcgggtaaatgaaagaaaacccaactgtaagtgcagtgtcgtctattaccagtctcttttgactacggagttttacaatactaatgatgatactctgtatagggcagatgatctcgtggcgatacggaataagtggctcgctgcgctacataccgcaagctcttgcaggtcaagatctacggaaccaacaatgatttaaaacgatcattaaccacaattttaggtctcgagatattcatcacgagagagtctatgtgaagcttggtggcattgagatcaccaatctttcacatttgatacacttcgagccggctgaatacaaagcaattgtcgacgatgatctggtagatcccgatggtgagatacaggtcttacttgaagtcaaggctaggcatctggtatcgacttcatcaagagaagtcctgatgcaacaggggcttgaaatgctggcatgggttgctgaaactctgggcattgaagggtcagagggaccaagagtcccactgagcgactcaccaatcaagaggtaggttttatcatgatcattatactaatgcttaagaaacatcgctaatcagttgcctatagatgggtgatgttagcccaatacgcgacaagcgtatatttcatcgtcgctgatctccgtgaagggtacattgagtactcgatgacaggcgagcgctcagagaacccccttgacaagaaggcatttctcaaaatggagatattgggacctttcagcatctattctgcggaagagatgcggatgttcgggtttcttgttgtcgccctgacagttgtccagcaccgggattggaagaagggtaaggaggtttagatagtaaatgaaaagcatattcttcctcacatagactcccggactccctaatatgtgtgagtaaaccctctttggaaaaacccatcagctagcatacacgcttccgcagtcgaggcaagaaatgcatcggctcctgggagactcccgcagataaagctgtctacgtataagtgtttgagaacagaacagaataggagaagccggggaatatattgtagcgagagcaaggaagggaactaaaacgcgaagacgtagtagacaccacgagcaaacttctactttgtgtcgcgtgaagggcagttcagcccttctcaagcagcaacttgggatctccgacggaagttttggatatgagcgtgctcttcgctgaaaaggtccgggccatattcaaatgctctatgtaggctagtccgtttcaaccttgaaacaaagtatctgcgttctgatgacacttccatgacctaactcggagagcatcatctcttactatatatcatgctgttgggggttacttgcgcaccgctatgcaagcgttagaaatcccccttattgaaatattatatatacagccatgacacgccttggacaagaaaaacgaacatggggctagctgaagtagtccaaggcggtgtgcccaactatttagggcacatctggtggcagctgaagcctgagacaggtggatgccgtgcaaaagtccgcccactcttaagtcagatgccgctctagtttgtccaatagaaattcgtccatcgctgatttcactgaacttgtccacctttgcgaaaatcatcgtgagagcttgaatcgagatctctagattgctcaagtatacaaagtatggagttaatagaggaattaagaatcgaaagtccacgccaggaacaataataagcaccgaagggaccgtggacccctaagattgtgaagctccacagtgacgtcaatggattttccttgttaatttcctttttcaagggcgtcgaacgccattttaggggtttaaatagatcgaatggcgcagcatttaatttccgagccttttcctgctattatataaacacccccaggtcgtttctgccgacggttgagtggtttatttagggttgatctagaattgtcctaccttttacaatctatacaatgaggtacattctggcacatgccctcgtacaggcctcacttctctcaattacctccgcctccccggctccaactgctttcgccaatatcgctccacccgatcccgtcgttacaccttccccggtcgagcatatcccttctcccattgttggccgaaacatcttgagcgacgttgattctgatatcaaaaatgtcctttcggggcttgggtctgatctacctacatgggtcgcatctggagtgcccaacttcttccaggggttcccgactaaagacgcagttgcgagctccctcggattggacagctcagacttggcggcattaccaaccaatgtgttgaacatcgacccttatgcgaactggaccaagtcgggctggaacgttcgcttccacggaaacgtttacaagcagccgaacacatctgtctccaagttgaacgatttagccgatatcttcctcgtcaacactaaaatcgcggaccttcctcaatcccagcaggtccaggcacgaaatctgactgccgagatctttgtcgtgcagcagccacatgttgcggtgaacaagatccacatcaagcctgcggttagtcagggatccagcggacagccaggcggcggcggatcatccaacacatcaggcggtacacaagacatcaccctaccttacaacacaacagccgaaggtgacttcgacacctttgtgcagattgaaagcaatggtcttactgcgggaaatgaaacctcggcaattcagagactggacactcatgtcgagggcgcaagtatcggaaatgctaccgcctatcttgtgcctccaaccggactcaccgtgatttctgacattgacgatattctgcgtgtcactaagatttacgaaccggcgcaaggactactcaattcgttcgctcgtccattcacggcttggcagaacatgccggatatttaccgcaactggtccatcagcctccccgatacgcatttccactatcttgtaaggctcctctggctccccttttcttaataaaaatactaatagtcattccagaccaccacccccgagcaagttactagaaactacatgcagttcatctacaccacctaccccggcggctccttcgacacccgtccgctcaactttagcgacgtgtctgccactctgtcgatccgcatgttcttattgcaaaagattttcgaaaccttcccggagcgcaaattcgtcctggtcgcagacaccagcaacagcgacgtcatgcgcgattacccgaaactggccaccgaattcccgtcacaagtccaatgtattttccttcgcaacacttcggcaaccgattcgggcgacaagttcccctacgacacgtccggattcaagggcctcaagcagtcaaagtatatgttcttcgtgaacgcggatgacctcaccaacctggacatcgcaaacggacactgttacaatcagtcggttgcacagaacctgacgttcagctaccagggattgccatttggactgggggatactccaactgctgtcaacgcgtcagcgaatcaaactggagcggctagcggactcttaaccaaggagtcggctggtgcgcagggcttcatgacattgatcgcagcgatgtttacggccgcctttatggttttatagaatcttctagttacgagtgctatgaactaaatggacaatttgatacaagtctttattttttttaatcccatatatttcagcggatcgcagacagcagctagctcttccagcgtcgcaactccagccaaagaaggaatctcctcaagaacctcaagcagactccgatttcggtcgagggcagacttacaagcctcataaacgagatcatgagcgccttgtcgtcccaaatgcggtgccagtcccataatcacagcatcaccgacaatcaaccccttggtggaatacagattgcgtttcatcgagtcaaccttaaccaccaatcccccgagggcgaaattcgtctggtgcaaagcgcccaccgcagtcacgaaaacatcgggaatagccacccattccaaataccacggtccagatgcacgctcaaagataaccattctatctaatccgagagacgcattggcacgcaaccagaccacctcactggagataggattacgcttccggggcatcgtagactaagcatttctgtgaggtacgaagggctccgagacctcgtcgaactcattggaagacatgatcattacgtccaatgcaactttccccaatgtgccacccaccagagccaggaagttgaggatctccactatgttgtcccgcgcaacatgccaagtgatatcaggattctttagcccaagctcagcggcaagctgcttacgaacccggagccctgtatcatctgcaccaaatacagcgatcgtacccgctgcaccgccgaactggacaagaagacaccgctgctcgatctcctcgatgtagatagctccgctgctgtagatcgatgaatacatcatatttacttcccctgagttatcagtatcacaagcatagtcttttactaggccttctcggccaaaacgtcatcaataccatatgaaattttcagaaaaaatggggaaaacgtgattggatagccaaattctacatgacctgtttggaaggcttattcttacgttcctctctagtctctcttccagatatgatgaccgaataatataactattttaccttcctggaagatggtctctcgtacggggaattccaccgagaagggtttgtatacattttggtcttcataaacctgttactaatagtcttctaggattccccatggcggatgggtagtagaccggttagttaatgggggtatcttatatgtctcaaatgctaacttgcagtacagtaatcaccactgccgatatttccccgactttgaatgtgaaaataccgagaagcgaatttcctctagatttactgagctgccatgagcacaagggccaccagcgctcaatagtcgggttctgaaaccaggagaaatgtggcgataaacggccttcctcgatggagctctttgcgattgctgcattaacccacgaagaaatggcccgggttgataaaaggttgtataagaatctgttggacgagtgctactttactttcccggtttgtttttccttcttgggtatcgttagtcttttactgatatatcttagcatttagtatttctgatggacaaatttggcggatgccgtatgttgcaatcttattttaatggcaagcttcatgttcaattctcggagatcctagatctaggacatatgattgccgtgcctgcttaccggcaaaaatactttgatatggttgacagaaaagactttctggagaagttgaacctgcttctaaagtgggcatggcccattccacaaggaaacaccgttgcaaatgttccaaggaattatggcaattgatttgctgagatgattttgcttgatattctggtttgcttatcttcaaggttaatgttgctgctctcagaaaatgaacaccctgttaagaattcttctctcttgatggcgttcacattacacctgttaccttagtatacggaggcttatagcctccatgggtgacttatttactatcggctgatactactttttcgctttctctctgccttcaattgatatacatattactcatggataatagccgcagatccactaagccatggaatggtatttagctttgccaattaattgatactaagatgtagatacaaggccgaagcaaaaacaagatggcccggaaatggtatctgggtgcgggccatcatcgcaatgagcttcccgatcatgtttcacatgcaatgatatgaagctaatctctctctttatactgccgagcagcataacgaacatattgaggagcaacaatgcgtcggaatgcctttccatatcgaaggaagacaacgaagaccatcaggatagcaattgcaatcaccaaaatagtgatgaaggtatttttgagaccaaccttcgccacccagggtgataacgcgaagataaacgccgtgctgaaactattgcgcgtgagtgttacacccactagtgcatctccaacaatctgaattggtgttagaatatgctctgaaagaatcatgggttcagaatggacttacatctttgtacgagtcagttaagtaggtgatggtgagagtgttgataggggtgacaccgatgttatataatgccagtccgacggcaatgacaggccatggccggttgtcattcagcccgatagcaaatagaagtgcgcctgcgattataaatgggagaaagggaatcatacaccagagacgcatctcggggtcgaagatgccgtttcgccggcgagagagaaatagaatccaccaatcactcagtgggccaacaatgagcgcaccgatagagacgccaatcattctcggtaggctcatgaggccaacctcataggaagagaagttatagggagccttgggcagataggccgacatagtagttgacatgacatctcccagagccaccaagatgccataaacaagtgccgtccatgcgatggctggaatagtcgtgagaacaatgagaggttgatacatgtggcgaaagaaggactcgttcttggtattggatgaagaagtggtggttgttaaggctagtctttgccaatacgtcttcatgggaatattcgggttgattgtgacagcagtgatgttgggttcatctgctttgatcgagctgagatctgcgaatccttgctccgcatatatttccttcattctggcggacgaaagcttctccaaatcgtctttgttgcggtcttcttcttgagggttcggtgcaatggaccggtcttcgttcgtggtatccagctgcacatctggagtggcgggagaagccggcgggcaatacttggtctcttcgtatccgaagccgacaacaaacattgtcacaccgaagatgatagtattcagccaccagatccacctccaacccagaccactggcaacaaacccggcaattagaatacccaggtagctagagagaagccacgtccagacatagagagcattcattcttcctcgttggtgcacgaagaaaagatccgcaatggtcatttgcacgatgacctctgccagactcccgaagaagcattgtatgacgttgatcgccatgaggtctcccacggtttgcatcttagcagaccaaatgcagactccgaattgaacgatcgtgctgaacagatacaagggtcgacgtccaaacttgagcgcaaatggaatcagaatgacggagccgactcctaaagcagcacagccagcagcatagctgtcatttaatatctcgctggtgaaaccgagctctgtctccatgggtccccatgttggtgtattggcgttgataaactcggcgaccatagcgacatagaagcagactagtcccatgttcaaacatttccgccatggggcccaattgaggggatcgttgggatcgtcggatggtcgtggttgtagaataatagtttttccatcggatgcagttgcatctgcaaggtgtaatgtaccgggaggccacatggaattgttgccagtaccgctattcggaagcgtcgaagacatattgagatcgaagatgatagaccgcagaactggatgagttgtgaggtctgaagggtgcacatatgtttgccggaatcaaaagttgggcattcttggaatataagaagtcgggtgttggacagtggccatggatgaggccagagagcagaccttctatagcagacagaatctacattactcaattactcatttgtgaggttatcacacaaatccttatctgtttgaagtggagtgctataaaccagtccaattggtggaatgttccgggagtggcagggttaaacgtgtgaactaagatggctgtggagcaaaaacgagggtttccccttttaattggcgtaaagtcccggttcaccccactggagaagtcgattaagtgaattaagatagccgtggagcgaaaaagtggtggaaagtcccagttatcgcagagaacaaaatgcggagtggcgaatgagggcccaccaactcaaccgttctgtatgtagtcagatgtaactttccgagcaagacaaggcggcttatcgcttgactcggaatgctaacgcgccatgtgtcagttcaatggcgagacaggagacaggtggggggagagcggggggaagcggacacgtataaatttatttcgaatctccaaaaattcatcgctcacatctactagataccgttcggatctgcattgggttgttcgtttattttcttcggataaccgacaaaatgggacaagatgcattcgaaaactttggttttccgaaacggaccaactattccatttcgcactggctacaatcggtgcagggcgatcctcttctggatcatcgaacaacaccagagttgcctgcgtctgcagacatagtgatcatcggatctggcgtgagtgtcttccgatgttcctgtaacttgtcggaagggttgctaagagctgaaatagatgtctgggacaataatcgccaaaaacatcgtggaaacctggcccgaaaagaaagtggtcgttattgaggcccgactattctgctccggtgctactggtagaaatgctggtcactgcaagcctgaccagtggcgaggcttcataggctatgagaaacaatttggtactcagcaggccctgaaggtatcaaattatcaaattctccggttatgcctccatatacgctaacgtagacctgcagattctgcaaaacgaacaacagacatggtccgaagtcgtacaatacataaaggagaacagtgtcgaatgcgaacattggagtggtgatacactggatgttccagttaccccccaggccgcggagaatgcaaagaagatctttgagcgctacaaggcggcgggcggcaacgttgaccacatcaaggttacaaacgaccctaaaaaagcagcagaggttcgcaaaagcgatgcatcttcaattgacccggctgacaggaatccagatatcgcaaatcaaaaccgcacaagcatgttatgcgtggccggcatcgacgctacacccctggaaacttgcggcgcacgttatgcgtgacaatatcaagaaaggggtgaacctccaaacaaagactcaagccaccagtgtcgtccattctggggaagatcaacacaagtgggtcgtcaaaaccgaacgaggcgatatcaagtgttccgaagttgtccatgcaaccaatgcttatagttctgcactcgaaccgtctctgcgggggctcatcacgccatgtcctcacatttgcaacaaggttattccacccaaggctgatgcaggctttgaaggcttcaagggctcttatggtgttctactcccccaagacgccctgatcaccatcaatcctcgttttaatggaggcggtggggttcttttcggcggcagcaacccaggtcaagatgagtttatggagtggctagagaaaaacccgcatcggtacattgacgatggtctgactggatttgactcggtcacgaaggctatccaggaattcgcagtagaaggattcgaaggatggccctccgatgccctgaagcagggggagacttataaggaggcctggagcggcatccttggacttgtaagtgcttcgcttgatatgaaaatcaaatatgggctaatattagatcagagcgaagacggcctgcctttcgtcggacaattacctgcacttccaggccagtggatttgtgctgggcaccacggacagtaagtccatacatgtctcccacgctgccagaatggctgtgaaccatgctacgctgacacttacaactcattagtggcatggcacgtatctttaccgtagcatccggcttggtcaagttgatgaatggaagctcttggactgatacgcggctgcccgaggttttccaaatcacggcggcaagaaccgaacggctgaaagagcgcgtgaagatatcacctgttcgtgctcgtatctgagtctccaagcaaaatattgggagtgtggtatggcaaggtcgagtttagtgttagtatgtatttttgactggtacgttcccatggggcttggacttgctaggaccgtgtaaaaaaattcttcatatgatatagaattccatacctcctagatatctgcgcacaataatgctctaccaaaaacttccgccatttgtattatttgctctgatacgcccgaggtgcggcacatttacgtcatagtccaagaatgatgacacatcatcaggtgatttcatcccaaactgcacgtgacccatacaaatccccacaagttctgttgagattcagttaactaactaattaactactaaaaataccatttcttgtataagaaggataaagaagaaacccctacattaaataatttcctaatccgcacattgcgggcacaagtcacgttacttaaccttgtaatctcccaactccacctacaattggggaaagcgtagaaatcacggcaatgcggggatttataagaatcagtggaatgggactagttcactcgttaccaatcacttatttgggtgttttttgtttccatttcggattttcctttggcaaattgatgagccaatcagaagacttggttccatcaatcttgcgagtgataagctctgaaaatgtactgggaaaagagtctccgtgctatctctcatcattctcactacgtccagccttgctcccagaacgtgaccacactgcaatatcgaggccgattgaaaaattgatgggctattttccattgtattctgcttcatgtttcaacctggacataataagagacagtcatcccgaggcactccatcgggaagcaggacaccgctcgcgtgcgtgaaatgcaaagaaaagaaattgaaggtaggattaaaaacctcaagttaagctcagtctcctaatccaataataaagtgtgacaatagggtctcaggatgtattaactgtctccgtgctggatctggtcggtatttcttttgccactcggcttcttccattgatgtgcgggtttgtgatgttaatctgacaccgaatgacagtctgtctcgtggaagatccagtaacgagggcatatcggccgcgaaactacattgaaaccttagagaaacgggtggcatttctcgagagtcttctgaggcaatgtcgtccagatcttgccaataacgacccgctcagacaatatacacttccaccagaagttcagccaaattcagttcccctagcgcaacacatcgagacacctgatcaacggcacggtgatcaatcaacctcatccagagccaaaagtgatgtcgaggaagatgacggtgttgacaagctgtcatcaaaggtcggcctactaagcctcaatgcagctggagcagagcctcaatatttggggtcatcttcgatttttgctttctcacgcctgatcaactcatcccttcgccaagtggtttcctctgactttcccacggctaacgtgcttgattggactgagaaccgctcttccgtgctaccatcaccgtgcttattgcctgcttacgaatcggctgtcaaacttagcgacatttatttccagaatgttaatacacattaccccttcttacacgagccgacctttagggcgtgggagtcgatgctactgaatgagtcgacggaattgggaattcttcttcccaattctgtctcgctgtttttcttgaatatggtaagagagacacggcctcatgctcattgaaatcatactcacagtgctaggtgtatgctgttggcgctttgcttttacccagtctcggattctcagcagaggtaagcagacatttcgattgacttacggaaagctgactggctcttagcgtttatacacgtcagcactaatgtatatcgatgatatcctggcctatgataatctagaagcaatacaagccatcctgtgctgcgcaatttactcacttaggtcatccactggtacttcgcactggtatggacagcatgaatacggggaaatgatgtttcgctgatggcatataggaaactcgctggtctagcactccgtcagtgtattgatctgggttatcatcggaatacaaagcaccttgcagcgcctaaagatctacttcaggtagagttacgtaagagggtattctggtgtgcctatgtcattgagactcaagctgccgtcatgctgggccgacctcttggtatcccttaccaggaggtcgatgttgaagtatgtttgaaattactagcccaaagacacgcattacgtgttgttctaatgtactcttgtgtagtatccgattgacatcgatgattcatgcatcaatgaaactggtcttgtgggcacgccacggagctccccaactgatgcaccaaccaatatgacgagagcgatccatacatttcgaattcgacgtcttttgaatcgaattcacacttatatttactcaaaagccgacccacgctactcaagaaagcacgaccagcagactgatgtgaagaatatacgtgccgagatcgagaagtggcgctccgaaattccacccacagcttttcaccccggtgaagagcttgtcttgtttacgactgcagattggtatgatctggaatacaactatacgatcctacagctttaccgagcccaaatcgtcgatcaccgggtggagactacagatgaggttttccttgattgtctgggcgctgcagagaacatttgccgaagctatcggcatcactttttaggaaagccaacgagatgtacctgggcagcacttcacgagcttttccttgcaggattgacatatcttcactgcctttggacatcacctgccgcacgacaggcagctggccacgggcaagcaagcagcacatgcaatgactgcacaatcgctttagtggtcatggctgaacgatgggatgttgctgcacccttccgtgagatatttgtggcgctcgctagccgaacaatgttgatgatgagtgtcaaggcggatgaaaatgtatctaaaaatgtggcttcggctgattccggtaattgggctgaagaggacttgacggagtggatgagaattgtggccgatgccggtgtgcttgagggctttaacggacttttgactggtttacccagcgaatgactctaccttcagtctatgcttccgaaggacatgataaaacgcgcgttgtgcgggttaagcgccgggaagtggggtccaggaaagagacttagggttggaggttgctagcggtccttgctagctagagacaagtgctcataacctaatggcgtatctgactacgttgtgcctgaaaaggggaaaacaactattgtcgattcgctaagataaaagtggacaagggagagagagagaggaagagggagccgaactatctgatggtgatctgggtccacatgggtgaccgccttccggtcacccaacatcccccctacagatctcatatctcctgttttgaaaatgatgatctagaaatgtcgtaatcgtggtagtcgtaaaaaaaccccaaattttcctttgaattaagtcatcccgataagcttcaagaaagctcggaattgctctttgggaagcgccttcgtaaacccgtccgccgcgttctgctttgtgtcaaccctcaggatgtttatgtgtccttgggccacggcgtccttcacgaagaaccatcggagtgccagccatctggtagcagacttgcctcccttctttgtcagtagcaactgtgaattgatgttgtcggtgtagataactgtgggatcgggtcttggcaggctcagtgagtctgcaaccttagcaagccacatagcatcccgggccggctggtcgagcgcacaccattctgctattgttgtggagttcgctgtgatcgtctgctttttagtagaccaagctactgggactcccgcaaagaaccagatacatccttcggttgatttggagtctgtccagtctgcgtgtgatgcgtctgtgaatgctatgaattgtagttcgtccgactttccaaagatcagtcctgtcttagggttgtgtctgaggtacttgacgacgtgtctcattgcctcgagatcagaaaaagtcggtgttgctagtctgtgttgtaggcgtgtgacggcgaatctgatgtctggtcttgtcttgatggcaagccagttgagcatccctactactgtctggtagtgttcgaagttctcgtcgtcgagtaggttagagtcaatatcttctgggttagactctctccatcctggtggtagtggtgtttctttcgttcccgcagtatctgtaatgcgtagaatcttttgtacgtaggcttcttgagacatgatgatcgtcccagcgttgtaatctctgtcgagtgcgcagttaagatactgctttggttctcccaggtctttcatgtcataatgtttcttgagttgcttcacgaccgagtctatctctccggaggtgggtgcggcaatgataaagtcatcgacatggatcatcatgattgttagatccgcgcagttctttcccatcttgacgtagacacacgggtcgtcctcgaggggtctgaagccggtttgtcgaagcttacagtccatctcctcgttccagaggaaggcagagtctcgtaggccgaaaagagcctggttgagtgtacatacccattgctttgaatttccttctgcgtctgcaaactcgaaacccgttggctgtctcatgtataccgtctccgcatcttttcttgatgcgttaaggtaagccgctgtgaaatccacttgacgccattcgaggccgtagactgcgatgagtgtcaagacaattttgatcatcgtttccgatacaaccggtgcgtaagactcgctcgagtcatcgcttttctcctggaagttgccgcagacaacccatcttgccttgaagccgtagacttcatctctcgtgttcgtcttaacggtaaaacgccattgtcctggaaggactttcgccttcggtggttttaggatcaacgtccatgttctcttcgcggcgaggtcatcaagctgtttttccattgcttccttccattcgttccagaaaggtgatttttgtgcttgtttaaaacttgatggtaggtcgacgtccttgtcgtgaagaggttttccgttgtacatgaaaggtgcgtcaatgtctacctgatcggagttgtctggcgaaagtttctttgcgtttccttcttgaggaggtttgtgtttttccgcacgcttgacatccctcttttgcttctcatattcgacgtttaggagtttttgtttaggatcctgatatctctctggtgggataccgatgttgctcctttttgatctcctgaccgaaggttcttgaatttgagttggtgctgctgttacaggttctgcggtaggtacgataggagtaatcttctcctgtgtctgcgtcagttgcgcagcgtgccgaggcgcttcataagtgtcctgcgttgatgtttgttgcgtagctatctgttgttcactgcgttctggagtctgttgagttggtgaagagaaaggatactggtactctgtccttgtctgttctggggacggagtgtcttcccttggagttgactctcgtggggagctggtttccctgatcaagtcctgttcaatcgagtctgcgtactggtgtacttccagcatgtccatctcttctgcgttgattctagctgtgagttcctcaagtcttctctggaagttggctttcctctctgctagcttttctgtcattgtaatttgctccgtctgaggggttgcattctcactgtgaacagtctgtgtctcctcttggattggagtaagagtctggttgactctttgcgctgttaactgttctgtgtttttgggaattggtgtccctctctgaagtctcccaaggatcgatcttgtgtgccttggtgcagggagtagcctctgtcgacgaggcattaccggggtctctggtatggttgaaacgctgccttgaattgtgggcaagtgaattgttgacggggttactggatcctgtctgtagactgttacaatctctgtccttggttcggttctggctgcgtcgatcagcgggatggaaatttcgtttgtgtcgtcatctcctgggggtttcgatggctttggcgctaccggtactcctccctcctgatcttcgtcccctggttgaggaaagctgacgtccctcgagattgtaatcttcctagtttccggattccagatttttagaatatgtccgttatccccctcataacccatgaggtgtcctttccaagatcttggagcggctttgcgtgcctgtactctcttctccttcggaatatgaacgtagacggttgttccccatggtctgaggtgcttcagtgacggatctgggttgtcgattccgagttctgtgcgccagtgtttgagtggcgatgtttgagactttgggttggttaatctgttgatggtgtagattgcagtttctactgcgtagggccacagctcctcaggtagcttagtatcgatgatcatcgttctctgaatgtcgttgacgtatccgccgaagcgttctaccgcgccgttgggctctgccgtgtagggtggtgtaacttcgaaagtcattcccttttttgtgccccaagtgatgaagttcttaaattctgttccaccatcgagtctccatattccggggtagcgcccagttcggagtttgattttttcgcaaaatgcttgaagcttgacaaatgcttcacctttgttcgtgagagtcggcccctcgagatatcttgttgcgtcgtcgaggataggcatccagtacttttcaccgttcgggccctcaggtttcataggctgcgtgtctacatgaaatttccatgccacgtcctgaacccgaaattgcggctcacgagaaatctgtttcttggatttaccttgaaaacatgcttcacagtcgaagtattctgttccatactgttcttcgtcgtcaagctcttgtgcttgtttcagcgttgaagtaagtttggcttttccagcgtgtccaaagcgtcgatgcgcctcaaaggcagaaattttattgactaatcctgtttcttcgtcactgtccgacccgtaggatgaatcttcttcgtgtgaatcgtcttctttaggaccgatgaggtacggaaccccgagtgatgtgtttgcaactccaacggtttttccagtgccgtctgtaagtcgcttagttcttgtgtcatacgagatatcctgttcttccaggagtttctgcatgccgaacaatttgccgtgaccccttgggctgtagtagccttttgtcaggaaggtgtatgttgttccgtcttcgagacctgctttgacaaggacctctccgtgtccttcagttaccactctgttgccggagtagtcccggtaggcgtatgccgattccgggctgtcctcctggtatgtgtagaaatcttcgaagtcgtgggtgagtgttttgtctgatccggtgtcaatcagccagctgttgaaactatctgtgtgacgagctgttgccgttatggccatattgcttcgcccctcgcttcgcagtgcgatcgagtaattccatacgtgtgggctgtgtgtccagtgtgcgggtggatcttctgacagataggaacacttttgagctttgtgtggcccgaaaccgcagtaggcacacatcccgctctcatccctttgtgttccttccttcttttccttgacatactcatggatatctttaccaggaggtggttggttgcgaagggtcttcttcttcttgggttcgttggatgtacttgagtcatccttcgaagatttgttgtcttggcttgaggaggcttcgctgttacctcctttgccgcccctcttaccacctcgtcctccgcgtcctccgccgcggttgttaccccgtcccctcgaggactgggctgcgttagcagtcccttctctgtcggaaactgcctggaggctcttgcaatattggtccatcttttcgagtgtgattttcttaggttcgatattactaatctcctcgatgatgaattgaaccttggatatttctttatccaattgccgtagaacttgtgatagtgcgtgaaaagggtgtggttgaattttgaatcgcgaaagaacgtggtattgtttctggtattccgcaatgaattccttcgcagtgttgaagtccgctcgtttcatttcgtcgaacttttttgtttcgtttagcgcattttcggccttgtcagagccttgcaccattaacatgatttcatcgaacattgtgtcggcgaattccgggaggtacgagagattctggattcgttcttggagtgtatcgtcaacctgaacgtacagccagctagccactgtgcgtgaccagtactcccatctgtcaaatttcgggtcacccacagtggggcgaggcatgctgctgtcaatgacatattccagtctcaatggcgcgagagcgaatttcacagggatcgcccatccacgaggatttctggaattgtactcgagtgctttgactttctgcattttcgcagccgagatgtcaggtaagttagtggcctgattcttctcgttgtatccgttacccgatgacattgtgttggcctggggttgagaggtgtttcctatctcccgagacgcgttgttattgcctgatggcaaaaattgtgactgattattcgggttgtcatccccagagtcgacaccgctatcagccatgctgagagctggtttgccaattctgttgttgattcctttggacatcacctgccgcacgacaggcagctggccacgggcaagcaagcagcacatgcaatgactgcacaatcgctttagtggtcatggctgaacgatgggatgttgctgcacccttccgtgagatatttgtggcgctcgctagccgaacaatgttgatgatgagtgtcaaggcggatgaaaatgtatctaaaaatgtggcttcggctgattccggtaattgggctgaagaggacttgacggagtggatgagaattgtggccgatgccggtgtgcttgagggctttaacggacttttgactggtttacccagcgaatgactctaccttcagtctatgcttccgaaggacatgataatggcgtatctgactacgttgtacctgaaaagggaaaacaactagtgtagattcgctaagatctaaatggacgagggagagggagagaggaagagggagtggaactatctgatgatctgaacccacatgggtgaccgccttccggtcacccaacacatgagcctcattttgtatggttgctggaatttaactacagcccaagttatcaaataggtttatgcgaaatggtcataatgatatctctaaaatacggattgttgtgacgcccccaaacagagacacgacgatgcaataaccactatgtgacatgaaacatttcgaaagttgtttggaaacgcgcagattcttcgctgtgattgacatgtgatcatctgcctcaactgaacgtcccattagcaggcccaaaatacccgacagctggcatcgacttgtatggtacaccctgggcgtcggcagtattcaagtacacgttattcccccaccagtcagggaaagtggcaccagggtacgagatgcaaaagaaaataacaatgccactgagggcaagacctgtatcaagggcagctgccaagatataattgtacttggtccaccaagcaaagaatcggcgtttaataaagtgattgaaggcaaagttgaccagtgcccagctggaatagttaattccggtcgctaaaaagcatttagttagcttttgaaataaagaggcactggcaagttgcgggacataccaggtgggacgttgtaagttccgacgaaaatgagaggccagttaatatacttccaaaactggcgtctagtataacggtagaggaggaaagtcacaactggagcgacagcaccgatccagaagaagtgcaacagaggggaatagatcttgcccacggagtaaagccgacggggcccaacaagaccccaaataacagatgaagaatagacagtccgaccatttggacaggaaaacccatccgtctggccagattcgcaaatatccgaaatattaccaagcatccaaagtgtaacgccggcctgtgtgagtgcgcccaggatagttgccacaaactgcgctacaaagcaggtacgtggcggcactttcagataatgagccaatttcatatccatggagaagtaaacaccctgtcccacgacatccgtggaaatgatcttgaaaatcatattggcgagtggctttccttcgaacatatatccaccaatgaactcggccagaacattcagctgattcgcatccacgttcgtaatgccctgtacgataccgcagggaaccatgtatacaaccgggatgatcaaggctagaaagactccgtaaacgggaagcttagtctcatagacttcgaccatcgcgatggacattgccatgataaccacgataatgccagcgtaccagtaccacggggtccgccggtacgaggcacggatgagccgagcatgaatatcgagcttattccggcctttgagagcagcccacaggtcgcgactatgccagagggcgatgtgcgagaggactgaggttatggcagcaaatgaaagtccgtatacaaaggcaaacgttgcgctcaggtatggaggcgagtacttttggtaagccactgtatctagagtattatccgcagaaatgactcgagccgtgtcgtagatggcgcccgtgttatcgtacacgtcggctgtcatgagtgggagataagctgtgaaccaggtattggtgtagtaaagggcgggtgtgacaatccagtagaagaacgcgaagccagcaaagacattcaacgcagcccatgatggtgataggagcgggttggtgttgtaggcaatctggctccagtcgaaggtaattggacttagaccgagacctgtctgcatgccgaagagatggttgacgatgacgttcttcggtgcgatccagcagacccaggtgaaataggataacgcagtgaatataagaccggggaaaaaataccagacaaaggcaccggtcataacgtacatgaagaatcggagacgggttatgcgccatccatctgcgatcgagttcgctcgcgaatgcaacgtttctagcatagcacagttggataatacacctggccagacgatgcgagccggctcgacgagccatggagctgcgagacccgcgacgccaaacccaagaagttgtgcgacgagaacaatgagcacgtagaagccgggcttgagattgaaattgtagaagttcttgctggcagcctggataatgtttgtcgcgtccgctgaagcatacccgaaggacacattgctcataatcacgataagcgcgtgctctttgatattaaacgacctgtctgggttgacaacgaatgtgcccaaaggcccgagtcggatggatgtgagaggaagagttttggccaggaacaccccgatcggataggcaagtagctctgctactagggccacaatatgaaccgacggatagcgcagcgaaaagaactgattgataccagatccgagcatagtgaaaacaatgcctaggagccacatccgcaccgtattgactggcatgctagggtcatccgtctcggggacgacagccctaactgtggtcactgttagtcaatcgacatatatatcaacagtgagctgggtactcaccttcagggaatggagagcggtgcgactcatagctgaactcttcatttgtattctcggagtccttttccagattgatttggtctgagtggccttcgactacctcttcgtcgactccgacgagagcgggtttgattgtgtcggaatctaactttttggaatacatggtagaaaagtttgcgcagtctcagcgcttttgcgaaagaaaacaaatggaatacagtgagacacggcgccttttctaggctgattaaattggccatggcggggacgaatttagtccgacgcgtactgaggggaaacagagataaggcattctgacggttggctttccggtggagagagtgggtttagcttaacttgacttaccttagcttcagatagtggactgacccctcaaaaactgtcctatgaacaaagccactagtggttagcctacattagtttgctttcaagttgccgacgaaagatagcgatggcaagcgagataagaagatgaccaggattgagtctgtggccgagcgcaaagccctagagaggcttagtccgagacaaggctcgagaactagaaagtaaaccggtttatggcaaagactccaggccggcagtgttatcattcagtaattcttgtgcaacgaagcacatgttttttaccctttctttaccatgcaatggacattcaacctcgtatccagaggtttcggagtccgactaggactccaaacatgatacgccaagcttcagccgcgggccaagtccaatcaagctttgcactgagtaagctccgttcaaaggcaccaaagccaattgacgacctcaaattcattttcttctgtatgaatattcccttgcggcaactcgagacaccattgtagtgtgtctcgacatatcagatccatcctttgaggaaggatatcgacagcacacttcacaatgatatcccaattactcctcgctatggcagattaaacaaaactgctgatttggcctcgataaaagctgttatttatatctggtctcgtcccatctgcgatttatctatagttaattatgagtttttactccgtggtgtacgttgtagtacgcattgggtgattctggccatgaagtcactacatggctatgtacaaatgctatgagtctagtgttcaaaggccattaattgtactcaatggtgtatcaccaaggctcggctgagcggcctatgcggtcttcgtactggcgatttgctcgccaggtcaccaggtcgcccgtattggtaatcactggtaggggtttactagtgattaccagtagggcatagggttacctcgacctagtaacctgatgaggtgaattcttctaaatgccttattgcagagcaaagcgaagcaattataaatcagaggtcgtacgtccgtacatgtcaggtggccaaatacttaaagcattggtagttagaatcagtcgctttgctctgcaacgactatctcggcggccgcaggccgacgagatcactggcaattcccctcaatcaaggccggtgttgcttacggccgacattatgtgaaaggacccacaatcgcgtcagcatctgcatcggtatcacgtacgcgactcatcgggagctaacatataatcatctttgatttagttatcacactctgctctcatgatacctagttgctattacgtgaaatagtaatggaaatcatctctatggggtttactcatggcaacctgcggtaagagcttgaaaacctattaaagagcggcctaatcccagcttagcacaagaaaaacatcaacgaacgttgactccatattgtcccatcccccttgaacaaagccgtcccagaaaaccatggcgcaattcggattccacactacctctgatcaggctgcagaagctctaaatgcgtcgattcgcaacaagactagtaagtttcagactaaattgtgagccccggagtttgttgctgagaaactactctctcggtcattattaccggtgtcagccccggaagtctcggtgcagataccgcgcgcgccctggtggctcaccaaccagcgcagctgatccttgcgagccaaagcgagaagatttgtgatgttatcgcctctctggacataccgtctgagatagtcgtccgagcactctgcctggacctctcatcccttgaaacagttcgcgttgcggcggcgcaggtgtcggaatgggtagcttctattgatgtcctgatctgctccgctggtatcatggcgacttcgacctaccagacttccatggacggcttcgagctgcagtttgcagtcaaccacctgggccacttcctcttcgccaacctacttattgaaaagcttatggctgcgcccggtggtccaacagtggtgaactataccagcgaggcgcactcgcgcgcgcaaatggatttcttggacgacctgtcttatggcagtcatggcggtaattacaacaagtggctagcttacagcaattccaaggcctacaacattcttttctcggtgggtttggtccagaggtttggcgtgcaaggcctccgatccttcggtgttgacccgggtatcatcgtgacgacttcgttgacgcgtagtgtcccaccagaggacttcatcgctctaggtgagatgcgtacccgtatgaagtattcattggtactggcggcgcttaggtgttcttggttaggctaggttgattaacagggcaaactgagctccgccataaaaacaaagacttcggcagaagggtcatcgtctgcgatcattgctgcctttgacaagtcacttactagtaagtgggattgatatctatggtgttatccgtgacagtgggaagaagattactaatattttgatgaagatgaaaaaggatatttcgtcgccgatggcattctttctaatagtggcctaaaccatgatgccgtggacccagatatggcgaataagctatgggaattaagcgagaagttgacaggactggtatcagaatgagggtgatggatggttcatcatcacgtggcaacgatagcccgtcctgatgtatcatgggtactgtacaagaaatgcaagtttgcactgagctattactcgtcagaggaacggacaaagtatcgatataaaatgccggtcttgtacgcatgttgaataaatccctgttaaacgcttagtagttaccgtagggtgtgacggttgtagaagaactacgttataaatactttcaagaaaattgaaaaatcaattcatgtgggcttttttatagtactgattttttactgacctcctaagataattgatactgaatctctgtctgccagctgccaggtctgtgcttgtcgaaaattgcagtaattgctgaaaggtctcaattgaatttattgaaatatcgcccttctaagttctgggtattagatagatatttaaaccaaaccgacaccgaagatatcatcatgactgtggcctagggcgttttcttactctagaagagtttctcggaggatatcttctgcctctctatatcgtccgttcacatagaggcagtatccagtctcagacttgtactcgagttcttattcttgttgtatcactgtagcctttcctcgggctacgtctaccagctctgttagggaagttgaaataggtatatcgtgaataacagcctccaccactcgtaaggaagcttttgcagtgccgatataatcaattgaaaccaccaagagaagctccttcgcataggctgccgctaccgccgccgtatagccttgccattccttactcttgtgtgaatcggcgtagtcatagataccccgaatgaccagatatggaaagtcattcataagtcctgccgcctccatttccatataatatatccctaagtcctgagccagctgatctcgttacttgccacctttcacgacttgattagcagatccaattagcctgtaatagacgactggttctgtatgttctcgtgagggtcatagacatagtttagatcgatcgcaattcacacatgtatcgcacgcgatatattagtggaggcttcgctggcagaaacaccacctctgtacccacaatgcccaacggtcaatcacgtactgtaccgatggcggaatactttatcatagttttcatccggtaaagcttggtccatcttcttaggacataagtggatgaggaagtcgggtttcgttaccttttttgtgtcgtagatgacgtccgaagccatggtggggatactgaatgttaggtttggttgcaatgcttagccagctagccgagcaacccatggtttcctttcccattactttctctacctagcttgctggaggattgattcattcgcgatttacatgccgtctactactcgaaagatttgcatagtcttcgttttaatgacgacagtgaaagaatcgtatgctgaatcggctgtgcttgctcccgggaagcgttgtgtagggtccgtacttgacggtttctatcgtataacacgaagtgtctttggagatctttcttcgctatgtgctccattgacttgactgtccatgtggtgcttatgtcgtacttatggagtgaggcgagaccagattattagcaaagagaaggcaccaggtccaatgagaaataagggtccggaatgatattccgtcagatatgcgctaagaattgtgggcaaccgcatgcatctggtaacagactacccatgcccattgttaacgaaaatttatccaactgatctctgacagcatagatacttaaactcgggtctttttgatctcgagaaaggagtgattgattcgtattagttttgagagcctgaactcctgcaaaaagacgccatgggtcttcctggtgcttatcatcaaagtctgccatcagaataggattggttttcctatttagatgggacttaagcaacgtcattagctggtcgagcagtgcgacagcagagttaattccatcgcgagttccctgtaccagggttgttgcataagtggatggaatcactccaacaaaggacgctgggggatccgtttccatgagcatgccatgaaactgaacaagactttctcttgatttgagaatacagctcaccaggccgttgagaatggatcgatcgacatctgtgtccgaagtcgtaaagtattttgtcattgcatagtagccagggcatttggctacttcgttaaatgcgtagtccatcgtctgacctaggagactactttcctgccaccggtcttctgccctggcaatctcttggatcgctgatacgcacgtccactccgaaccacctagaaaacagggctccgcatggataaaggcatctgcgactaggtaaggccgccaagaaatgagaagagtgcgacccatgccatgtgtatgtgctgaagggccacgggcgcagaacaggtggcggatgccatgtgaatgaatgatccatgagcgatcactactaccatctagaacctcatagccccctagcaaaatcgcagctgcaagtgtttcatctgctagtgcggcccgtgtatgtaggagagaggccagatggtttacaccccgaccatacatatgacgagcgcacattatggcttctttattgcctcgtgccgcccccatgcgcaaacaggttaaggcgcggagtgcccagatcagtgcctggggaaatgtggaccacctgcctcgtataaacttcatccaattcatctccacgcgggagttgaaggaagcgaggtaacttggaaaatggtagtccaaccatacttcgaatgattcctgcgtttggacattgatcgcctcgtaggccaaatttggagcaaaggcttcgtccattgttggtcgaccgtgttttagggtgatatatcgcgtctggtccttgaatttgtgaccacgatcatagcctgggcattccgaaccccagttaatacaccgcagacattccggacgagttttatcgcactatgtatcctttagttcatgttaccggctttattttgagatcgcctcttgcagaaaaaaacggatgagaggtccggaatgacatggtaccgcaatatatcagcactaaccttgaccttgcggcttatacactgcaaacatcctttactatgagggacgcccggcattcttgttctatctggttgtcccagagtgcacaagatagctaggaactaaagggttaatagtatgaaattctacctccaattggtatatgagatgggaataaggggctttcgctacaccgctccggcagaaaatattaaaagctcccgaagtccaccttgaggatttaattgttattttgttctaatttctcagaggtcacataatcccatagtagtagatgagcatctcctttcctcccgtctctctttcatggttcaacacacaacggttatgagcccggggagctcgtcattgatctgatcttacaatcggtcaatatcctcggttctgtgtggatctctctatacaggggtctggttgtagtaggccgtggtgtccccgtctcgttattatatggagaaggcagagccataatcgagcgaatgagtgattctcacccagattctcacccagattctcaccctatctatatcacacagtcatttgcaatctacctataattctctcccacacattatctaatacatacgaccatagggtgtggaaaacagggcttcccgtccgctcagccgtacttaagccagtagataatacgccattaagtaaatatgacgattataccaccaatatagggtcctaattgtaaaattagccactgatatccaacgatacatatagagatagtgatagtctaaacataccaatcgcaggaccactgacagatccaaccataaagcagtcagcagccgtcccacgcacagtctattaactcccgttagtgtcacgattggcctttgcgggactctctcataattagcctctaaataaaacatgatagcaagcccatcatgcaaagaatttcgaagtcagaggaagcacacaatagaaactagaaggggcccttttcacatgcatctcagctaccttcgttaacgtatcacgtagggcttgtcacgattggcacttgcgaaactcgtactttcccgttcgggattgtaccgttggtcgttccttcctgttcgagggaactcgtttgcgcagacagtcgtaccttccttctgggataaatgaggatagggctttgcccccgaagggttataaagaccccattgttgtttttacatttgttttcttttctttccttctccatacttgatattcgattagcaatgcacttcttttgttgaaaggaacctggcacgtaacagttagtaaccagaagacaatcggaatcaaactaatataccggttcaaagatatccgcaagaatagtctatccagcaaccataaagaaggtacccgtaaagcctcccaaaatacgtattgcgatgaatatatacaaattgatcgccgcggcggtactagccgagcatgtataaagtacaaggatagctgtattataggtattgcgacgcccgaataggttggtgatagggccccaaataaaagacgagaaccctatagcacttagtatacatttatacagagatcagatgaagggtaatctcggaatagtatcgggccgggtagatcagacgaattgatcaggtgattgtaaacgaaatacagggcttctctacataacttatggagatcacgtgattggtgctgcagcactcccgtcgcagcaccgcagcaccgaaccaagggcctggtgctgcggcacttgtcaaggcctacttagtagtataaaccaagtagacaaacccggcggttatctataagcttaatatactatttatggaagacgaagccgccgctatagagtatatccaggactagagaaggaagatataagaagaatatagaaggctgtttaatataatacaggagatagaaaagaaggttttcgggataaaatccttcttccggaggcatcgtctaggccttttaccctgttagggttaccgagagggttttagcttagttaactagggacggtcaacttctcgccggggggtatatagtaaagacacttagaacccctatatttataaccttatctttcaggtaggaaggacataaggcctagctcttaagtaaagttctagagggacagtattagagaatcatcatcaccccggaaatgaaaaacgagttacgagatatctatacaataggagattatatactatggtgtgatctatataatccctatgcttactagctcaccgtcctagatggttggtattgttttgtcgttctcgtcttacctgcttggccaggctgcccatcgtgcatatccctcttcacttggtatattagctctagagttagccatggatgtcttccatggttggcaatcattagtggataccttggcatattagcgccttttcacccaactatgattggtccaggcaatgacacgaccacgggatgatggatcctttccacgccctgcggatgattcctctgtgggttggcagcttatctttctttaaattggctcctgaaaccttcctaggtttcttccaggttcctccaacatgtttcttatggtgagctaagcatttttgaattttctagccttggaacagttcacggattctgtttcgtctcctaccggaatatttccctactttttcttttgatcgccgtcgaccctggctctgagaatcgacgaagtaatgggctcatactccccaacaaaagagactgaaaaggggcttcaagcttcgctagaggggacgactgacggtactcacgtgtcaaatgttgactatggcacgcaactcccccccatcgatggcggaatgaatgcctggctgttcctcgctgcctgcttcgttatggaggctctcgtctggggatttgcattcacgtacggtgtcttccaagcgtactacagcgatatcccccaattcaagggctccggcaatatcgccgtcgtcggaacctgcgctatggtaaaaattgaatatctcatcttctaacccagcccgagctaacgtacatactccagggaatcatgtatctcgacctccctcttgtctttgccgcctaccgacaatggcccaaataccagcgcttcggctgcggtctaggtgtgctactaatgtgtgccgctctcggcctgagctccctcgccacaaatacaaatcaccttatcataactcaaggaatcttctatgcgctcggcggcagcatcgcctacgccccctgtatcctcctaatggaagagtggttcgaccgacgaaagggcctcgccttcggcgtcatgtgggccggcaccggaatcggtggtgtcgtcctccccatcgtcatggaacagctgctgggcaagtacgggttccggcttaccttgcgtggctttgcagtcgcgttgtttattctcactgcgccgctggtctacttcgtcaaaccccgcgtgccgatcgcagataacctacccagtccgccacccccgaacttccggttcatgtttacgtccacgtttgccctcttcgagttttgcaatactatcgaggcgctcggttttttcttaccatctatctacctcccaacttacgtacgtatgctcggtgcctcgacctccctccaagcactgactgttatcctcttcaacttggcctccgttgtcggctgcgtgcttatgggcgctatcatcgacaaactcgacgtgacgctttgcatcctcgtttcaactgttggatcctctatcggcgttttcctcatctggggcttctctatgtcccttgctcctctgttcctcttctcaatcgtatacggtctcttcgcaggctcatacaccagtacctggcctggcattatgcgcgagatagtccgtaaccagccttccgccgaatcaagcatggtctttgcctgtcttgcagccgggagaggtgtcggaaatttggtttccgggccccttagtgcggctcttattaaggggatgccgtgggagggggacgcagggtatggatatgggagtggatatggatccttgattgctttcaccggagttacaggcgttgtgggtgggggaagttatgttgcgaagcgtatgaagtggttatagcctctgctaactcactattgtgccctaccgacgtggtggatattggtggattatctgacaatggctgatatacgagcgcctctagcgatattttaaatcttggagccaaaaatacatgtgttcttagattctagggagttgatgactcgaatagcaatttccaactttaacaatcatccggccatatccgtcgaaacgaagtgccatttcaggccagttaatcacagagatggagcgagacagatcgccattttggagtatcgacatatgtggtgttgaccaaaacctccatcaccgaaatggccttatcaaagatatcaatcttcttatggcctatacttgttccatttgaaacaagcttaaaaggtacatccgtgcactatcggcatctcagctgtcaacgatctgcgcatgtacctggtatgaccgaatcacttggccattcatctgatcctccatcaacacaacacggtcaatcgaggtgggtttgccgagcctgatggtatactggcccttttcattcgaagagtgcatagcatcacttacaataggcttgctataccacgagctgatgaaatcacctagttgcttttaacgggctgcgtgttcctttggtatagctccgcttcgatcaggggaaagatccaactcgaggatacagtttcggcccatggtcttgtgtcttcttccttttatggcgcaaacaaatgcagaaataattacaagctggacagcactaaataaggaactagtatgaacattggatttttgaccgaattctctactatagcagtagtcagtgaataatatgatgattgaatagagaatttctttttttagaaaaaaacatacaacagtgaggattcgctggtggtcacccacccaactactaactcaccggcgnnnnnnnnnnnnnnnnnnnnnnnnnnnnnnnnnnnnnnnnnnnnnnnnnnnnnnnnnnnnnnnnnnnnnnntaagtacggctgagcggacgggaagccctgttttccacaccctatggtcgtatgtatcaaactgtttgtgggagaggtatatagaacaagggtgaggaaattgggcgtggaaaggactaagtgcaacaacaataggcagagtgagggttgggtgagaaatttcgggcgtagaagaggctaataacatataagtggaaggtgatataatggtaagcgccacttaaaaatcacgcgaccggaggtgacaagggtgagtgcgctatagacggggtgagaagccaggtaagaaatcacccaagtcgcacgaccaatgcattgaccctttcagccagacgaaagcagaatttcattggaccgtgtcgtttcccttgaaacgctcggcatgcacataactaaaactggaagcatcataccacaagtactacgcctgtattgacgccccgattggtcaggcctgggccccctcaggatatgtatgcggactgtgcaaaaaaataactagtctatgggaccccgcaccgtctctttttgactatgattccatatttgagtcagattttacaaagacggccatgaacagcctcaagcaactcaaaactgagttcaatgggcttctcactcatacccagtttctgctatagcaagatcgtgcctcgttctccaacactctcatcttagcctcgatttctgatcgcagaccagccaggaaagatcattgaggcccgtggtaataccttcggctcctttacagataattgcgggtgttctgaattagcttcaatcttcctgggaatgccatacaagtaccatttgtaagaacaatgaaccacaaggatttcttagttaaaccacgagtaacttcgacttgcaatacccaaggaaacgcaaatatccgattatttgttcttcacaataatccaagacagtcgtcttgagctagttgaaggccgaccaccagttctcctctctgcattgtgccccttaacgtcgtgccttctcaacccacccggggaattgtaagtctttgaacatttcgtgcaatgcaatggcttttttgacgctgctagcctgggcatttgggtctgctgctgtgttggctttggccggagtggtcgaaagggactctgagcaattttactcgcagatggtacatgctcgatttcatatgcaggaactgactgtagtatctggtcgttccactaggcttctataggctggttagcaagtcaccgtctccaagtaatcagggcacagagtacgaacgagaggaagtattgatcgaacaaccattgattaaagagcattgattgaaggcttcgtgggccggctgaaatggcaactggtgcaaggcagcggcattgtaagcgtcaaaatccaacgcggcatctctagtgaaagaagacgcgacgtcaagcttgtcaccaaccgtaccaggttgggagtacactgtgggaagtataggcggctggaaaaaacccatcatccccgattcaagatactcaatttcctttgggttctggtcctcgaaccaagactcagtataaaatttgtcatcatcactacccaaaccaacattagctctcaaccactctccactggttattccctcgtccgaacgtcagcaggagtgtcgaagacagactcctggcggggagaagcatatggctgaacattacgggtcataatgcagcaggacaggcggggattatgcaattgcattgcaaggctattttgcgcgcgtgatacttgatacgtagatacccggaaaggcgactcctgtccttgaggtattccattgattggatttatctcttttgctttctccccggcttgcgctagcctcattgtccttggcgactttgctgttacctgaacgcctttccgagctggacatttacagtggatagtcatgctgatccaactgccccctcaacacacatttctattgcggccataagaaagctttaattcacgtcgcctttgatattgtaactatttgccgctgacgtgtttgaggtatatatttcaagtcgtcgtcagtaggaagatcactaacaattccggaatggctgcggagacgaagtcaaagttacttggattctcgaattcttgttgctaatgataaaaagaaatcagctccgccaatgtagagtggtaaatacaaggcccaccgtggttggcatgtcctgtggattgggaaaaaatgccatgatgcgattgagtcggccgaagtaggagagacgatcaagtctgacaagtcagccgaagagccgaccagatagcgaataatggaaagagatgggaaggtaaaaaagagaacggtaagctcagtggataggacaagtctctgagtgcgatcggggggtatctatagccttgaagatggtctgtgcggcaccgtgcctcaggcagttgttcagagactcgtgcgggacgcgaatactcagaaatagatggccaatatagtcgcagagaaacgcacgagtgatgatcatgctgaaatacaacttgtcgatgtacctggcggaccaatccaaaattcgagaatccaacattcgggcttatggttgggtcattccgcagttgacggttgcatgtaagacagcacagactcgtacgaaggtgtatagcggccaacagccggatgcctgattttaatggttttatagcctaattaggactagctcttaccaattttagaccggcaggaaattaaaatacctgaattactatgacagatctcctagtaccaaattgagaacagcttgaaagttgaaacatgaagctattcatacccccccccccccccccccccccccccccccccatctnnnnnnnnnnnnnnnnnnnnnnnnnnnnnnnnnnnnnnnnnnnnnnnnnnnnnnnnnnnnnnnnnnnnnnnnnnnnnnnnnnnnnnnnnnnnnnnnnnnnnnnnnggttaaaaattggaaaaagaaagtttgcataccccccccccccccccccaaaatactatttctcatcgatcctaggcgttaaggccctccaactatatgaatctcctgtatttaaagccattcatacccgccgtagtcccgcactttcccggagaaaagctaatagcgcaactgacaccaaggcccaaaacggttggaaagccaagcctggatttcaacacaaagtccccattcctaccgaccgtataaacttcaaactctccgtatcctctggctccggcgtggcgaatatttgaatgtagttttgagaattaaaataggtagaaggcatttgaattaccccatggtaacagtttcgtctcttcgatgtgtacttacaaaagatggtattgagcggtgtcaaaggcggtctaaaactggtaagagctagtcccaattaggcgataaaaccattaaaatcaggcatccgactgttggccgctatacaccttcgtagactcgcaataaccaatcctgtggccgaaaatcaaacccttcttagtcgctgttatcgtggctcggtcgatcatgcatcaacgtgagacaccaatcctggtggcttttcatctcacgtcatgggcagcgagagttttctgaattcgcgaatgagatattcgagaattgaacacgatctcaatagcgtcagcgcaggcaactgaagtatgttcgattccgtcgactgatctggcaattttaggtatctatgcgctggcagctgttggggtacagtcgggtattcgtcattctgtgttttcgcggttattttggcctcagctaattgtaggagaatttgctaggacttgtgtcaggtttagcgggacagattgatacctgagtataagatgcctctatgatcccctctaatggcattatctcccgccttacagtgctcctctgatcgttggtcttagcctgagatacgcgcagttgttcttcactgccactgaccactcaaaccactgtaagtaggggacttggctggtatcacttccaagctgacaaaatttagacaccattgcctccatctctctcaatatgcccagagcaatccctcgcatgttctcacgggcgcccgactgctgcggcgctcagatgtctcgtcgccagacaagcagcaattataacggcaatagggacagatggcgttatttctgccgaaattgccctcgtatggtctttgatgactgggagggcattcgagatgggaatcccttgtgtgactgttcggagttttctcgtgaacagatcgagcatggtcgtgtttttgtgttccggtgcgcgaggaaggattgtaaattcaaggaagaggaaactcaatgattggtaggtcctgacactgcgcgtgggatgcaagtagcgcaggagcatgggatgccgtcaatgcagaatcttttcctatatactaaatgtcctggcatttcgaaaattcaattcgcattttccgaaatgcagacgggcaattgatttctgagacgtacgtacggtaccacctacctaactatggtgtacatatattctcacgtcgcttcgggatgctctcctcttaccacccaccatctcccgagttttgtcgattccaaatcaagttctttcatgatcttcttctagtgtctttcccaaattgtactccatacacattgacgagtggctctagtcacgccagctgctcgctgacgagtctcatcatcagactagaactttagcggtcttgacatgtcgcagatctgctaggttgaggcaagatcctgacatcgttatttctcaacatattattgcttcccaaatttccctttgactactgtgatattgacttctccggattccaatcatgtccagtcttcacggactccttcatcgacagcgaccaggaccgtggcagagattccgggcccggccttgcgtcttcctcgcataaatgctttacagttggcataaacctattccagctttgcctctcacaaacactcctgttgcgattatctgtatatccgatactcataacaccaagccccacgttccagatggtgacatccttatccatgctggtgatttcacacagtctggatcttttctggaacttcaggacgcacttgcctggctacgcaacctaactcatgctatcaaaatagtgattcctagtaatcatgagctattacttgattcagcttgggatgattcgctaggtcaagcagcctttgagcgagctcaactcgactggggcgatattatctatctggaaaatgaggaggtaacagtttcctgcccgaattttcgccagcttagggagttcgaccaaggctccatatatgtggccacgtacatgaggcttcaggaaccgagtggatggtgtttaacggactccaggaggcgtacgagcgtactatcgctacagaaggaggccttaagaatcttctgcttgcaacgtgggagttaaccaaggcaatatatctccgcccggttgtagaggcaaaatgtttacttaaaaacccatctattgttggaggtttgtgggacaatgaacggaggcagccggtcaaggtctttatataatgttgcaatcctgttgttcaactgaatttagtcctgcctctcttgcctttcaactgattctccattgactccgcaaatttatggttaggtaaatgtggttaatggcgtattatcgcgatgggatattgagtaccgggccggtcaatttcgacattctaggttctctcatgaatcgcgctgaaatgcgagagagctacctttcattacttattcaagttacatcttctatccaaagtcggccatatctgtgtttaacccgggaatactcgcaatcagattctcctgatgaacctcctactccaacacagagcgtcctcctcttcccctaacacctctatccttcaattgaattcatcacaccccagtcaccctccgtccaagacagcgtcatcttaaaggcctcaatcttccacagtccactttcattatcctttaccaaatcagcatagtactgcgccccagacatcagccgtggctgatcgggctcattccccttcccaccgcggtagtgctgcgcgagcgcagaggcagtcgccgcggccttaacgccactgtcggcgatgtttatgcggatgttagtgacgaagtgagtggtatccagcttgctgatcacttcgaaacagtcggtgtggatggcaggaaggcccgagaaggtcttatcgccgatagagaatgtagcggtggaggtgaaggcggagtcaaagagggccaggtcattcgtgtctagcccgaggacgcagcgatagagtgcatcagcgatggcgtcgcggccgctcagggtaggtgttagggctgcgggcagggagaaggatgtcatggtaataatagatgatatgggagtaagaaggatcgttggagtgagaattgtaggaaaagccggggtattcctatcaaagaggaagcttggcgttgaggtgcgaagcgatttagatatatagacctcgatggttgttaactccgctgaaccatttatctccaggaatccatcggagttaaggctatctcggacattaccagcggtctcatatacagtgttatgtgctgagcaggtagatatgaccttatttccccacctggacttcctttctttctctctcctagctagcaattacaacgacatcttgcgaattctggcctcggataggcccataaggcgggcagagtactaaaagagaaacagacaaccttagaagccaatagttcggtcttctaatgcaacacatggggagtactattgttagtacatcatacacgggaacgaggcctgctaaatctccttgaaatatttgcagaaggtgcaagcttaatctgagcctacctagtcctgtttctcgtactgtgtaccgcgatatatttgcagctgacgccggcaggcacacttgtactcctgtccctggttgattctcctcctcctactcctcctcctcctcctggtgctgagggaggcagagaagatgaacatgacgatgagttgagtcctcgaccaagaagaagaaagcggttagtcaagtaatcttcattggtatcttacatatctcatttttttgtaaaacatgactacgagcacattgactatttccaacatctatatcacaatagttgagctcggcattatgataaggaaaagttaaaattttgctatttgctccctacttgagcagttcaagttttacagctctgacaactctccaacacatgcatcatgacgtggcccgtcttgtagacctctattgacaaaacaagtttactaatagtaacaacctcatcgataactaactacagagccttccaaatattaaaccagatgcttgataggtagttctcatacattgatcatgtagaataaatcacctgaccacggggaaagcagcctagtccaaaagcggttagtggcgattcagctcttggcactcacccgtgagttttgcgtgtcgcgaccaacctccccaagtgcccccagcaacccgtccaatcatcactttaggtctcctcttccatctctcgcggccttcattcacgccattactggctttttactgtttaatcgtatactaccattgcgctttacacggcagacagactgatacggaaagaagttgacattccgccgaccgcgacagctgtttgccttgatccatcatggatgacactcacatcaaccaagctgcggcccacgagaatgcccagtctatgactggcctagatggcgcagctgatgcagctcgcggagcctctggtatgcctactctcaaatggcttttatgttgcaccgagtgctaaatttgtggacaggagcgcaatcgcgccagaattcgcccgtgaagaagattgagaatacacctgggtccgacaatccgatgtacgccccagcatctcccaaacctcgccacggcggggttgaaccggaagacgaagagatgggtggtactgagaccgatgccaagcccgacaccgaaggcttggaggatgctgcgggcgagtcgcatacgcaaggagagggaacagatgggcttgaagatgctgtgggtgaagaacaacccgcaccatccaagtcgtctctggaagccgccgcgcgcgaacaactcgtcacgcaaacacacgccatcattctccccagctatgcgacctggtttgatatgaacaccattaacccaatcgagaagaaagctctcgccgaattctttaatggccgcaaccgcagtaagacgcctgctacatacaaagattaccgggacttcatgatcaatacctatcgattgaaccccatcgagtatttgactgttactgcttgccgtcgcaaccttgccggtgacgtctgtgctattatgcgtgttcactcattccttgagcagtggggcttgatcaactaccaggtgaatgaccgtgttttcccattcaagcatcttatctaacatctctgcaggttgaccctcagacacgtccgtccaatattggcccgccattcaccggtcacttccgagttgtcgcagatactccacggggtctgcagccattccagcctgggccaaaccacagcgtcacgtccggcaagtttcatccaggcacacagcgtgctgtctcttccatccctgcatccaaagacgacctcaacctcgaactccgccgcaccatttacgatgaaaaaggcaaggatatcacctccgccgaagataaagagaaacagatcaacggcgaagcaacaaacggcttggacattgctcgggaatccaagaagaaggcacactgcttctcttgtggtattgattgcactaaacttcgattccactacgctaaatcggcttcgacatcagccaatgccgctacgccagacaccaagtatgatctgtgtcccaactgtttccttcaagcgcgaatgccttctagccacaatgcctcggacttcgttaagctcgaggacaagacctactctcacttcactgacaaaaacactccatggtcagactcagaagtgattttgttgctggaaggcctggaaaacttcgatgaaaactgggaacagattgcgagccacgttggcacacgatctcgggaagagtgtgtcatgaagttcctacagctagagatcgaggacaaatacgttgaagatgtcccagagccgcagttgggcagcggacgtgaccccatcagccagtcagaaaaccctgttctttctgttgtggctttcctggcccagatggtggagcccgcagtagctgccgctgccgccggtcggtccgtcgacgagatccgcaaggagctccggagccagctggagaaggggcatgacaaaggcaaagatgcagtcaagtccgaagattctatggacgtagatcccgcacgtgaggccgagcagcaatccgcgaagcctaaggagactctcggcaccatcgccctggccgcatctgccgcgcgtgccggagctcttgcctcgcacgaggagcgtgaaatgacccgcctagtctctgctgcagtcaacgtcaccttgcagaagtttgagatcaagctgcagcaattcaatgagatggaagagattatcgaggctgagcgtcgtgagttggagcaggcgcgtcagcaactcttcttggaccggatgacattcaagaagcgtgttaaggaggcccaggatgcgctccagactgtcagcctgcagggccccaacgaacacacgcatcagatgctagccgatgctgctactacaggtattggacaccactacagcttccagcctgttggcggagatatgcgggctggaacccagcctctaagcgcccaaggtggtgctgactacaagacccttgacctgtaggcttcctcaatacatgtacgataatccctcatggatcttctgagagggaaacctaaagggacttttgtttcgtctcgctgagttatgaatattctgaactttctggcttggaaaaggcgcacttttgtgcccttttttttttttttttttttttttgttatctgctggagttcttttctgttgattctccctctctccagaaagtggattgttcttagggggttgaattaggggttggggatcttttttcatcaatgtgtttactctttaatcatacgtccttgatgggaagcttgtaatcttgctcaaagtagagtgtaatacctctcatcgcctattgagtggcctagttgaccgaactttgtcttctaatattgcaaccaggactctagcggttggccgggtcttctccttgctccgactcatcctcatcgtccccactctcaactactgcatcgtcgccagaaagaaccggagcggagatagcaactgccggttcgttgtatctgggccttttcagcggaggcatgtccatgtcttccttcagatcggcgaaatcgtacccgtactcctcccactcgctacggtagacggtccgatcccgccaattaaagacatcttctcggattctgcgttctggcagtagcttagtgtcttcctcgacttcttcttccttcataggttcgtcgaggttgaacggcacgggttgttccatcaacttcagaagattggcctcttcgcgatggctgatgttctggtctgtgagttctgcttgctcttcttctgggtctatttccagttcgtctggcaatacaaccggcgctggtgtttcggaggactcgtgcgtaggcaaagggtagttatcaaggtcgtctagctctgaatctagttccgaatctggttcgtattcaagttcagattctcctgtttctggttctggtgttgcctcaggttctgcttcttgcgggttgactgccatttcggtctcatcatccattccgacatcgtcgtccattccgacatcgtcgtccatttcaatgtcatcgtccatgatgccgtcgtcttcgctgtcctcttcgttgtcatcattatacatggttccatctttacggtaccgggtccactcgtgtgtttcgatgatctcctcggcttcttcgtaggtgaataccgtaggcacccagcctttccggttgttgatgtcttctaggacagtttcattgcgacgagcgatttccacgaatttaggcctgcattgcttcatatggagcacatcgatggcggcccggacatcttgcgttcgaacatacccctttctatcattcccactgcgacttgaactgcgcaatcttgacattgcaaagaagagtgatgattggaccaagcggcgcgtgacactgacagtgagggagtagaagtccacggcagtatctgcagtcatagaaggggtatgtccatacgatgtgattaggtcttttctgttggcaaggttccaccagttgttctcagcttgctttccaccaaagttcatgaacaaggcggaagaaaggcgaatccaatatggaaggttcagcaaatcagctgcgaggcggaggtcacctcgagcactgtcgtccttttcgtctgccagaccctctgcatgagctccagtgataatccagttatctccgtgttggtttgttcccgcttgagcttcaagaagggactctttcaatgatagaacatccgcatattcctctagtagttcgcagcattccgggctgacctctgtggccgctgggatatcgctcaagacaggcataacttccaggtgcacgtcggaactatactgggcctccaaggccttatgcaaaagtcggatgtattccataacctcgagttccgacttggtgccgattgcagtagcaatctctttgatgctgcctttgccctttcggtccaatgcattgaagaacacttccttctccgtgggcgtccagaccatcgagccatgttgactggcttggtatgtgctctcgagttccttcaacgaggcataatcaatgacctcatcgttttgcacgataaggtgggagtaggctcggagaaatgtgagaggtccacgcatctgcgggacgcgtgccataagcgcatcgccaatttgtcgtctgaccccatcgaatgacgggtcgcggttgtaatcatatccgttcggtatttgatttggagttgaagagcgttcattggacgagcagtgttgctcaaagtcggactgaggctctggttgttcgaagtcagactcaggctcgaagtcggactcggactcggcgtcgtcgtcgggctcataggcggaagcagagtcgctcatcgttcaggctcgcagatttgcagcgcatgcggaacgatcggtagcaaaacatcacagctacgcccttaacgaaatctgccacgtcaattcatcgaagagctatagaaacaactgaaaaaaaagttgagaattacaatgtatggtaactaacaaatttgaatggacatgatgacaaattgtaatatacagtgactgttcataagtttttaacacccccacccatataccgccttcctatacagtctacaccgcgtacaaaatacgcagcaagtatgggaaatgattgatctagagcacctaaagcatctctaagacaatgcctcgtgtacaggctatcattcatagtcaggggtggtatgcacacttttgtatggtatgccccgtaccgaccgtcacatgacattctgaatgtatttaaccgttgccaagattgttttatgcaacgttatcgataagattgtttgcactgtttgttcttgtgtttgagcttcgccggagaacaaaagggcatttgcaacatctgcatggagttcatacgctgtgtctcgcgattgagacatccaagaagatacttggtgaagagtcctctgttacaaaattatttgcgccatgtacgcttcaattcgaccgagtcttcagttcctccaagcattgtgctccgggactaccaagaggaaagcattcagtccgtcctgaaatatttgggtgaaggccatcgacgtctggggatttcgcttgccacaggagctggtaaaacagtaggttagactcgctctctatccaaaatggtactgatctttgcaggtcatattcacacagcttatcagccgaatccctcctcgcgatgcgaaagccaccaagaccatgatcatcgttcatcgccgcgaactcgtcgaacaagctgcgaaacactgcagagtcgcctatccagacaagaccgtcgaaatagaaatgggcaagaatgttgcgacgggagcaggagacatcatcatcgcgtcggttcaaacgctagcccggggacgcatgtacaagttcgacccgagtgcattcaaactcgtgttggtggatgaagctcatcatattgttgccaaaacataccgcgacgccctggggcattttgggttgaacgagccatctgccaatggaccggtcttggtgggtgtttccgccactttctcacggttcgatgggctcaaactgggtgctgccattgatcatattgtctatcacaaggactacattgacatgattggtgaaaattggctggccaatgcagtcttcacaactgtcaagtccggggccaatttgtccaaagtcaagaaagatagtttcggagactttgccctcggatcgctttcggaggcggttaacactacgtctacgaacaacatcacagttcgggcatggatggcgagtgctgagaatcggaagtccactcttgtattttgtgtcgatgtcgagcacgcgcggcagcttaccgccgcttttcgcgaccatggcgtcgatgctaggtatatcacagctagtacatctaaagtcgtccgtgcgaaacagctacaggcttttaaggaccaagagtttccagtgttgcttaactgtggtcttttcacagaaggcacggatatcccaaatatcgactgcgtgctcctagctcgacccaccaggtctcgaaacctgctcgtccaaatgatcggacgtggtcttcggctgtttcccggaaaaaaggactgccatgttatcgacatggtagcttcactagcaactggagtgctatcaacaccgacgttgttcggcttggacccagacgaagtcttggacaacgccagcatggaagacatgaagaagaatgatgataagggcactcaatcggaacccacccctgaggccgaggaaccatatgacggctcggacaatgacctaaaacttcagttcacgacttatgacagtatatacgatctcctaggagacatgcagtccgaacgacacatcaggtcgttcagcccgcacaactgggtccgggtcggcgatgaccgatatatgcttaccgatatatctggctgggtaacgattgagaaaggggacgacgatatgttcacggctcatcatgtcatgaaattcaaaaacccggcaacggacgcaccgcaattcacacgtcctcggaagatcgccactggctctgacttagaaagcattgtccgggcagcggatacctttgccagtaccaagtttgatgagcattacatcgcatcttggaaaccttggcgacgggcccaggcaacaccgggacaactaaagatgctgaacgcagctcgcattcgagatggcaatgtgaagcccgaggacttgactcgcggcccagccgcccagnnnnnnnnnnnnnnnnnnnnnnnnnnnnnnnnnnnnnnnnnnnnnnnnnnnnnnnnnnnnnnnnnnnnnnnnnnnnnnnnnnnnnnnnnnnnnnnncattcgagatggaaatgtgaagcccgaggacttgactcgcggccaagccgctgatatgattacaaagctgaagcatgggggcaagaaacgcttcaaggacttggaggttcagaagcggaaaaagctgcggcaagtagatgatatggctgagctgcaaagaagagttgatgtgaaggtcgggccagtcgatgcttgattggaataacatgtggtgccttgtaaaccattggatcaacgaacacgtttaacaagcgaaatttttctaaacagtcgcacaatgcccgagagttacgtgactatgtgccgaagagctccaactgtacaaagtcccagagcagcacccgtggcattattcgaagttgagattagtatatccgtgagctctatcacttatatattttacacttgtctcgggatatatttcggcccaagctgggcggtatgccgagacagaccgaggagccggtgcatactacataattgaaaatataaactttacgaagatgattccgattcagacggtctttcgggtatggctcttgatggagtcaggaacttgtagttacttggaccagcacatataggtttacaggtctacagcagtcttgagataataacgaatgtttgaacagagaattgaattgaattttgtcctagcaaagcatatgaaattcatcaaacgatcataatgtgcatcaataaacgccccaagtgggcgttcaaaggtcatcctcatcggagaacacctcctcaccacgcttgcggcgggcagcacgatccttcttcttcttgcgaagctcagagcctgtaagagaacaattagaatttgaacattgtgatgcataaggaagtaatgattggataacttaccagtaagcttgaccttctttgtaacaacgatcttgttgcccatggcatcgaacttgtcctcatcatcgtcacccttggcgtcgagacgggggccagagccttgaccctggacccaattgtgtccggagggggtcatgacaccgtcgttgacggcccagacttcctcagtcaggtgctcagtgaactcacgggagtgagtaatgataacaacaccaccctcgaaagacttgatagccttggagagggcaccgagggagtcacggtcgaggtagttagtaggctcgtcaaggacgataaggtgaggacgctgccacgagcaagcggcgagaacgaccttaacacgctggccaccggagagaccgcgcatgcgagagtgagaaacaagctcggcatcgagaccaaagttggcgcagtgctgctcgatctccttgcggacaaggggacggaactgaccggaggcgagggcctccttctgatcaacctcagcgacctgcttggggtgagagacaataatctcggagcgaggcaaccaggtgttgtcagcggacatgagaggagtccacttctcggacttcatgccgacgttgtcacccagagaccaagagatctcgtactcgtaggtgttcttgaacttgcgacgagagtggataccgatgacacggcggagggtgccttcaatcttgtagatcttgtccatggccttctcatcctcctcggtgacgatcttgttggcacggtccatggtctcgcggtcctcaccggtctggaaacgccactggatgtactcggaaggagtggagttgaggtggttatcgatgtgagcgaaagcgtgctgcttaatgtaggcaatacggatgttctcgtgctggtagacctcaccggaggtgggaatgagttcaccagtcaggacgttaacgagagtagacttgccagcaccgttggcaccgatgacggcaatacgggatccaagggagacctggaaggtaattccgtgaatctggggcttgggggtaccggggtactggaaggacatgttgctaacacggcaaatggccttggacttggtcttaacaccctcaaggaaaccgggctcggggaacttgaactccatctcggaggcaccgagctcgtagtaggaccgagcagcggggtgctgcttgacgaactcggagagggtaccacggtaacggcggagcttgaagcgctcgtagtgaacgacgtgctggatgacgttgtcgaggaacttggagtcgtgagaaaccatgatagaagtgcagggggagttcttcaagtactcctcgagccatgcgacgttcttgacgtccaagtggttggtaggctcgtcaagcaagagaatatcggggttctcgaagacagcacggcagagagcgagcttcatcttccaaccaccagagagggcagtaatgggaccctgaatctggaactcggagaaaccgaattcgttgagcagcttgccctcgagctcctcacggggagggttctgtccaacctcagcaagcttcttctgggtccaggcaatgacggtctgctcagtatcggcagagtcgagatcgtgctcgacgtagacggtcttgacctcatccttcttggggaaaccctcgagctgctcgttgttgatggcacgcatgagggtggtctttccggaaccgttggggccgaggagaccgtaacgctggccacgcttcaggcgcaggtgagtctggttaagcagaatcttggcaccgtaagccagggagaaagtgcagttgcaaagatcgacaccttcctcctcatcggaggcgatggcatcagcggcggcggcatcggggcaagccttcttgcggagctcctcagcgatggacttagcattctcctcaccgacgatggcagtgatgtaaggcatggtgttctgggtccagatgacgtggtcgttctccttctcgtcaacaagctgagcggcgatggcagcaacgtaggtgatggcctcctcggaatgggcaatgacgtccttgtgcttagcctcgaggatctccttgaggatggcaacgatggtggaaatgtcaccagcgcgggaaacctcgggaatcttgccgtccacaacgttaccaacacgggaaagggtgtcaagagcctggcgagtcttctcacgggcctcggggtcggcaagagtctcgaagttcttgttcaaaccgggcaacatcttaggcaagaagggagcgacaagctgggggtcctccacgagcttacacatgttgtcgacaatgacagcggtcttacgcttgatggcggtctcacgctcgacgagaccacggtcaagcagggggaccatgatagcgagggtagggccagtgacatcagtgacgaaagtagtggcaccgagcaagtgaacggtctcggcgacgttctcgggcttggcgatacacttgatcagctcgggaatgaaacgctcaatatccttgttgacgatcagaccgcaaaccttctccatggtggagtaggcagccttcttgatctcggccttggtgtcccacatagcctcggagatgacggggatcagagtaggaacctggtagccaagctgcatctgggcagactcaacgaggatgttgatgcagtcgagagcagccatcttttcgggccacttctgggcgttggcgagggagtagaggataggggtgataacggccttgacggcgttaccgctgacagcctggacaatggcgatagcggtggactgggcggcctgcttgacggcgacaaccttgtcaccaacagcggcgaggacggggccgaggagagccacgaggtgaggctcaacaccgggagcgattgtggggtgggcggcaatagcacggataccctcgcaggcacgctcacgggcagtagcatccttcttgttggcgagctgcttcttgaagatctcggtggccttcagaggaagagtctgctcggcgataggaccgctgaagagagtggcaaggttggtagcagcggcgttggtttcgtcggcgctggtggagatgttgaggttcttgatgaggtcctcgaggacagcgaccgactgggcggacgccttgccagtggcggcaggagtagcgtcggaggcggcgggcattttggaagaaattttggcggttggagaagagaaaagggtattagagtaaagaaagaaaaatcctttcttttttttctatgaggggtatcgtagaatttttttttttgagcaaaagactcaaatgcgtcaacttttcagacgcgggcgctcaaagattggagcgagacttttttctattctgtctatgcagagtagaaaaacaaaaaaaagaaagaggccgaccctcgaaaaaaagatgcaggagtggaggagaggagggggagaagggaaggggggtgaggatatttatcgtgtggcataacctgggcggcaaaaccctatgaaaatggaattcagattttttctgaattttcaggctcatgttccgcgctaaggtcgaattaggcttagctgattcgttgctgcactatcattggttgaagccctgctttggtccgaatcgcctgtccatgattggttgagcccgttgcctggctggatttggtttagttggtggcttttcttttattttttattcgtttcaatattatattgatgtctatgttgcatgttgtatagagcctatacggagaagttacgggcatctggatatgatgtgaagaaacactatctgtctgctctggctctcacctcgagtcccgcatatctcatgtgcatatccagaaatagtctagtccctatggtaccaacacttctatcctcgttgtacaatatacaaagtacatcgtaaccagcaaggcgcgcgagtcgtcgttcgccacgcacgacaagtggcgcagtgccatataaacgccaaatgaagacccccgagttttcccccaggcactacatattttcggagttgctagggtgttgaacgttattctacttcatgggtttattgttcctgtattcgcccagattcgggcttggtacctccgtgtcaactgtggatgcttaccactgaattacacatgtacctatcctatccgagactatatccgagactagatatccgtactccgtatgtagttgacatgtaggtcagagctgagtatgtttcagcaaaaataataatcatcggataagcccgtacaaataatatccaacagccttcataaccacctgaaagtgacaattcgtacaatatatatgaacgtccaattaaacgcgaatatcaaccacgggatgtctgagatttctttcaccgcttgatttctcttatcgcttatcgcgtgttttatacaaaaagccctccaagccctcgtacgttgtacattgcgctactccgtactaataataacatcagacgtaagcaactagaacaacaaaccgtcgagatcctatcccccgcgaaaaagaattatggtggcaaaacaaagaaacccaaacccaaacccaagccaaaagccaaaaaaaggaaatcggctcagtcggacccagtggacctgaaaacctaacaggttccttactttcaacaatgcctattgaaaaaaaaattcagtcgctacttcgtatagcatggtcactccgtaggaatccgagatttccgcgcgagcgaatcacaagggaggaattcttttttttttctgaaccaaaacaaaggttgcatctgacagtgacccaagttcgcaggttcgcactcgtttcttttccgtttcatttttgtctgaacgtggcgttccctcgccacttggcacttcgcctacgtcgaggcgaggtcatcacattctacaccgtatgcctcgacatacggctgttctatgttgtacaatatcatagaaatagagtaactagtggcaggtgtcatctgctgatctagacatgtcgttttgatctttagagagtggatccatcatggcatctgtacccggtgccccagatgtttatttgatggggaacggaggcgaatcttcaatcttacttagtctaacccctttataacgagttagctcagttatgctagacatgcatttagtcctgatccaccattgaatccggggtagatgccgtgtaaggaggttgtactccgtagtgcaattgtgatcttgttgcattcgaagctctgatcctttcatttctgatctatttacttctgtttcttgtacgttttattctttcctctttctctcacggcccctttttacccatgcttggtgatgtatccaagcccctttttgtggcgtagcgcttagacccttccctttctctctgatatatagtcctaggggctgggctgagatgacgggcctatcactttgatgaagcagaaataaaggggtaacctatcggaggtcggtcatctccacgctgggaaataccttcatcgactccacatttatcgcaccgtcttcgctccgtccaactagtctcgctctcgatactttcagccaagagaacgtctacggacacactcttttacttgcgatacactccccgctaaactacttcgagtacgtctcccgctggccgcaaattttaatcagcttgtgtaagccttcatcctcaccttcatcaccaattcttcatcgaccttgaccagacttgccatccttttgctagatagctaggtatctatgtctcatcgtggtaaaggttacagacgggcacgcccgccacctcgttttaaagagtataaggcccaattaaatgctacccagggtatcctttgcccagattgtcgtcaattcaagcttcgatcacatggctgtgacccagtttgctaaacctgcggcaatcattttaccccacagactggctgtccagatttatgtgatactgctccctgttgtggctgttgcgataagaaacttattgataaatcgtctgaatcttttatgattagcactaatgggttaccagtccagaaggtatagttgtcttactacttagttataagaagtttatacttactaataggatttttctccttttaggttattttccattatttatgacccgttattaaagtacttctcgacttcgtccttttagattagaccttagaggctgattttacccataccccctactatactatagtattagttgacacggtgagcggagagccagaaacggctgccattgcaccgcccctctgccgtctccgaccgcctgcccttctccgctaccacatccgacaatggacccacatctatagactgagagcccgccgtgacttgttgcttcggatttatgttgcaacgagcttcgcggcatttaacgcccgtctggcatggtcagccggacatccaagtcgcaaaacaactcctccaaatcaactaaagccctaagacaccctgtcataattgtagaggcaccaatacgttgaacaacggagtgtatttcgagataatcaaggagcccgttagacaatacgttgaacaacggagtgtatttcgagataatcaaggagcccgttagacttgatattcctggacatagcaaatgcaatgatgttgtaaagtaacgatatccgtagaatccgtggatcagtggctcgtcctcataagtccactggtaggtaactctttaggtcgtttgccccgtttttcattgctgtatgtttcccactgaggaccccaaaatagacgtgcgcttttcgcaccaccgccattttgggccagccttaattccttttcgcgcgctcgtactcgttgactgtgggttttgctttgacgtttcctcctatttcttgcggcgatctcgtctgcactcttgcccgtaaatattcttcgtagccagtccatgaatactagcagttgatcgggttatcagatgcggtatctgcagccccacaacttttgaatggtgccagtgagaccaatggactggagtgtgttctgtagaacagagatctttgtctgattttacggatcaccattagtatcatatgcggccacatttaattgatcatacatacgctgggtgcagaagtcaggtaggctcaggggttaaaatcaggtatagacccatcctattaattggatttcaaataaaccataaagccacgtgactatctttgcttatttactgtatcgtacgctggcatcccccaccactaacgctcttggacattttgattcttttgtccctcggcctagttagtgccctggcaacaaaatatccagccactcggcagagaacggaccagccagggtgcatggatctacaatctcgcagactcgagaggccggttctgttacgagccaattcgattcagaagaaaggagtgcaattcaaaccaaattctaagtacgaagaagaaaggaaaaaagagaaactatctgagtgcgcgttcttcccttcttatacccttgcgtttgtcttcgcttaattctcgttcgtccacttggaaaggtacaagggcatagtcgttcctgcctcgtttggcaagtacgatccttagatcgtcacaggttctatagttgctcggcgttttctttgtgcgcgccatgtcctgctgctatttgttattctttccatgcattaccagtttgcagttttggactagcgtcactctgaagctaactaaccgaattgagaatacatacaaaatgcatgtcttaatggttgagatatatatttccagctgagcatcgtatcatcacaactatgtagcctttcaattttcttgggatcaatacctaggaaaagcgttgagaagctttattgatacctattaaatgaccatggaagtaaacaagaacacggctgctataatttgaagttataaaatatcgcatttactatgtgttttgggtgggcggctagcttagaaattacgttatccaaggacaaaaaaaagatgtataacgacagctgtgtgattcgaacacacgcctccgaagagaattgatttctaaattgggggttagtaagagaccttgcttggtcagaggtattaggtggaactcaccgagctgtgtaaggttagcaactgctgcttaatttggcggtgggatttaacatactcaatcgccttagaccactcggccaaactgcccttagatgctgaatttctccactattgaatcctagtggttactattcttaacctcagaaagcgaccgtccgtagcacatcagtatcctgagaccatccatgtgacaaaggacgctatttctggccccaaaagcggcaattttcggcgtcaatcccacatgtcctcatattctagatgtaaaccagaagtgggcaggatacatggcagaaatatggtcgaattctaagtagtacccaatctggaaggcggtactgaactaggtgggagataatgtctgcaatgcctccgccctcttgtacctctgggtataaccctcctgatctatagaatacttatcacgagcaccgtgcaccagctcaactagcgagctgaccgtattgcaaatgccgcgcccagttgcgggtgagaacttgacaaagcgatagtcccgctgggttgcaaacgcttcagcttccgcgtgcaacactggggcttcaccttcacccatggcggcgatcattatcgcaagaaaggggaggaccccgtctttgcagcggctgcgcatcctcccgcaggcggcgaccatttcgtcctacgatgtcctcgacgaagcgtcgtacgtgaagacgagacagacatgctgcatgaggcagaggtaagctaggccaacgtgtatcagagaggctagccgggcttgtacgacgtgcataggtactccaagagcccccttcgctgcgtacatgttgtacatattcttcaatattattgagtgttggcatgcatagacacttgaatatatggcctgtctatggcagtaagtctacggagaaaaatgtgaagtggtacagattagtatgtgggaatgcacaattctataaaagaacaaaaacacacagaaccgccaacacgcccagaaccgtcaaacagaatcagtccatcctcgaacccgcaaatctatgtccagtgatcgaacaataaaacgaagcagaaagaaaagaaaagcacaccaggatatatacaagacgtcgtcatagcagccgccagaccagagaacggaatctgaagtccggggttgcgggggtcgagtagtatcacaaggtcctggtgattctcactaggagaaacatggcctcgtggattaggtgtcgtgggaagaggtggagaggttgaaggagtggggtaaaaggcaggaaaagatggggacatcgatacgtaaaatcgctgggaaagacaaccccgatgtctgtacaaaaggtgaaaacgctcgtaactccagacccatatgcgcggcgcaactccgtgccaaaaggcaaataaaacaagcggaacaagaacaacagacgtgattagctttcatggcttcttcttaacgtggctgctccccgtttcaggtgggagctcgtcaccatcgatgatacgccacagacggcgcggtgagaagttgttgccaaacaggtaaatcccgacgagccaggccgcgaggagattggcgaggtggtggagaagatacgcatatgagacgccatagatcgctgaatagatggcgatggcgaagaagatcattgaggtgacgtgtctgaacctatagcggagatggatatgttagttggaacttgtgagatgtaacactctagagtctacatacctggtcgtgatgcgcggtatcatagcgccgctggtcatggtctcgacgagaaggaggaagggcataatagataaaacgttgtggtgggatgagaacggcataaaccagtgcacgacaagattgtgggcccagaccaggaggaccagcacgttaattggcagaatccacaacatcaagattaagatggagtgtgcatagttgtcgaagttcaggtgcgaggtggatctggtttctttggcgtgccattgtgcccgcacacatgtggctagctgcacaatgcaggcgaccatataggcaaactggtaggggatgacggtcgagacaaggatcaaaaggatgacggtgtggatgatgcgtcgtcgaggagtgggagtatggaagataggcaggtttccccggtcctctcgccggatgtagcctgacttgctgtgtacgaccccataaccccaggagaagatgttcacgagggcaagggcgagatagttaacaaggacacatacaccaacgctaatgaggccgaataccgggactaagaaccagaagaaagcgtcttgtgagccaagcaataggtcattcttggtgaagtcgatgggagtctcggtcgaattggaccgccaatggaggggttcgtcggtctgaggcagggctttggacgtagccagggaggtggccagcagagacatagctaccagcaggagcgggaaggaagaccgcaacgcacgatcaaggccctcggtgaagggaatgaagtaaccagactcatcgtagacctggaactgcttccggagaacgagggcaacgacgagcagtgggaaagccgcgaatatggtccgataccgcatcactagctcaccaagactgctggtgagatcaacttggagggagatgtcgaccgtcgagtcagaggttggatccgtccacaggtgaaatgatacgcccccgagagcggcctgctcactaattgcaggcggcatgtacggcgccacaccgtgcaggttcacgttgacctcattgacattgacgaaaaacttcgactcatgagggtcagagacggattgacggagcaagggagcgaacagttcctccttttgaggatggcgagtgatcttcaaccggtagtcgagcagactcgaatacaatgccgggatcttaacctccatgagcattggtcggttggcgggtagccgcatctttaggccagcactgagcagccctcccaacccaaccttagcccgaatcattgcatccgagctgtccgaaaactcggcgataaggaagcctggagttggtacattggctttgtctacgacagccacaaactgatgttctgcgagcgcctccaagtcgtattggagatacgaaaatggtggggtacgatcgtaagcatgtttagatgagcgggtcgaggcaggcaaatgaatactgtcctcagccgcgctcttgcaggccaaacgggttgatcccacagtgccaccagagaaatctaaattcaagggaaagttggttgaacggccattggatagcgggaacacgctgcagaataggacctcaatattgccattcttatcaagcgattggtccgtgagcagggtgaactttttaccagagacgccctgcggaggaatcggtaaaagacgaacatcggggccatgctgtaggcccagttcacgcaggatcagccgctggccctgcgcaagaatcgtgtttgcgttatcctcaagtgtcagaagtgtatttgcctccttctggggcagtgtacgctcggccactggctccagacccgtcaagtaccaccgcttgagcacacgcatccgttctgcgcgtggtttcgtttgagtagggcgtcgggcatcgacgatctcaaacaaggatttaatgatggtcttgcggaactggtcgcaccaagtaatcgacagatgatccatgccaatccagacatccggaatagaagaggtgaatacggtaaatccgtgggtctcgggaacgagagaggagatactggcgtagtcggagggcaccacggtgtcacgcgcaccacccgcgatggagatgagagtgacatgccagagtgggttattgttcgcccaagtctgcgcataggcgtcgcgccaatagtcgttgatttgtttataggtgtggacgatatcggaatcgaaggaaacaggcggtttcgcatgaggtgcagacatggtgatgatcgtattgaccgaattggcttgatagttcgccatggtcaaagcagtgcgagccactattccccccatagagtgtccaacaaggattactgcgctgggatccggtaacccggggtctcggcgggtgcgtcgcggatcatggtaaagtgacaggatgtatgagatcgcctcgttcacgtattccgcttgatccaacagtgtttgtccatggaacgccgccatatcttcgttgaagtccaccatgaaaaagtccaagctccgcgttccggccgcatggcggctctcgtcgtgtcggaccacatcgtagtaatgtcgcgaggcctcggcggccagagatcggacttggcggtagcttccagcgttcccgggcagaaacagaactgggacaccgttcaactaaacacagagtcagtaagaatccaagcgcatgcaccgagtccgggtcgccgtaccccgatgttatcctgggtgtaaggatccacgccttcttcccgatagacgaagagattgtatttgcttgcaaagcgggtatgttccgtgtcaaactccaacatacgaatgaacgtcgggctcatcatcggaacaccgcaaccgtctccgccatgttgccgaccggtgaacgagccgacgatgcagactaagatcgcgacagcagcgcaagtggtgaaggccgtcaggatggagcaagaccatggactgcgttggcgagattgtcgcgcacggcggccgccggaaggggggacttccatcggaagtcgcggggagcccaatggcatcgatttggtatcgttggagggttggaaggacggggtgcgccacatactcgagttccgggagcgcggtgtcgcgctgccctcgcggcgaaggtcaaagctggtgccgcgctgagctatctgagatcgggttttctcgtcgatggcgtttccatcgtctgttcgggagaccgaggaatcttcgtcctcgacaggggagcccgacgagcgtctgtgcattggagaaggtggagccgggacttcatccagcacacacagacaggttcttggcgcagggggttaaacctcgcaagagaacccttaacgagtaaggaacgaggggaggggaaggggtgggaatggggaaagacaagaatggaagccggggcggttggaggtttgtctggggtcttggcggagaaaaggtgtctgtccctgacagtccgtgtcaagtccctgaaagtggtcttttttgtgggtacacgtgtaaagtgtttatggactttagcagaggttcttctaatctttgatctcttacgatcttgacttaagatattcaccgatgctcgtttctttttttttccgacgcaattggcaatgtaggcttggcactacatagccctagtttgttaatatgaagcaagcctatgttgaggatggcctacaaataatatactattttatagctaatataaacagaatcggatcaagacataaggaaagctcaaggtcatatgtatagatgcgctgagccaccacggcaggcaatcgtgtatcccctcataatgttcctgcaggacgcgtatgccacaatagtaagactggccaagtgcttattaccatcacaaatagtatctccgttagatattagggatcgcatactatccttgtacaaccttgaaacatttgaaaccagctggatgttccggtctacccgtggacccctagatatgtagacgactctagttatgttgtattaactattaggagcaatgacgtgacagactctggcaaggctattaccacggagtagtatagcatcacagcgctatagaacaactagcatccaattgatttataattagctctctttttatctcagttgattttgtttgtattctcatttaaaacaattccaatctcagctggatatagtgtacaagtgcggggtgtagaattcctgtactataaagagcctctcctaagtctcacgctcactgtgtatttgctctttgtaggatcatcactattatctagtataggctggtactacgtgatttctttgtgctccactgttacacttaaggaaattaagataccccttaaccctaagactggcctgtgcaccagaatgagcattgtacattaagcagattcagatctttgacacgacggaacatctactagtacttaccaaggccattgggtgacacccgctaaccttctactcatagagcaacgaggatacacgagagcgaagggtactaccgaggttaatacacaacacaaagcgaatccgtgaaagccaattcattgtcctatccgattatcccattttaatgtcccttccacattctcccaaacaaaaatcccaggtcattgaaaggtccagaaatacaaagcaatcatcagtcattgcgcgagcgtcaggtatcacagtagcctggtagtctacggcacaatagtagtcgtagccttctcaggatcttccccgaagtcctccttgggattgagaccacggtgagcagcaacctcctggaggtccgcatcatgctcagcatcgaagttacgacccaaacgctctggtccagcaattgtaatcagaataacataggcaaagacgcagcccatgaagatgcaaatgaccttgccgtactcgtagcgatgggcggcttcttcagtagggggcaacgggaagcgttcaccgatggttgattcaatagtcgagctagcggaggagaccaagttgccgagctggtaggcggtgccgacagcgaaggtgcggatagatcctggtgatagctccataagatggatagggatcacaccccatgcaccctggaccatgaactgctcgaagtaggccgcagcaatgacattcttgttctggacaaatgtgtaggggtagagaagggcaccgccgatgatggagatggcgatgatagagaaccggcggccgaagatctgactggcccagccgcataatacaccacctgacaaggcgcctaggttggcgacaacttgtgtcacggtgactgcgttctttgagaatttgaactggttctccagcattgtcgggtaaagatcctgagatccgtgcgactaatttccatgttagcttcttctgttactcgaatagcaagtaatacataccatgaaattaaacccagacataagcagaaccaggtatatgagtatcaaccagtgtcgctgtagtgcgaccttcccttctgagatgaacgatgccgcaacacctccacgcaattcctgtcgcgcttcctggcgccgacggaaagtctcagtttcaccaaggaataaccggaagatgatgatcaagactggtggaccagcggcaaaccagaacagcggccgccagccttcaggggtagtatcgactagacctcgagcgaaagccgtggctagcagatatccaaaggcgtaaccttgctgcaagagtcccgagataataccgcgggcttcaggcgggcaatcctccagcgcggtggcagccgcattaccgtacaagccacccatggcaattccaaacaaggcgcgacaagccaggaactgtttataagtctgacagaaaccagcaccaagctcgaggacgacgaagagcaactggttgacgatgaacggccatttgcggccccatcgatcggaggcgattccgaaggtgatggcgccgacagatcgcagcatcagaaccagggtgattccccatgtgatatcggtgacggatttatcgaatgatttcgccagtgcagaggcagtaagcgagacggtgaagaagtcaaacgaatcccaggaccagccaagaaacgcgacctatagggttaggctagttagtcaaggacgtttcctacctgttagccttatggggaggaggacataccgagaaattcagccactgagaccggttgagcagtgtaagagccttgaacgggttcggcgccgggttcatgggaggcactagagaggagatacgagtggcgatgtagcggccaacactcatatcctcctcgaaatctggcgaggatgtcgccgcatactgagtctttccctcatccatgactgctaaggatcttggagcaccgatgaatcggagagtaaaagccggatcctggcacaaagtccgaatgaagagggataagagaggtcacaagtcagccaggggggtcctgggccgctctaaatacggcggggaaccctcctctcctctctgctcaccgaatttagcgggcatcccgaggaccgaaaggaatcaaacaaatgaccaccgacgtctgcgggcccgctgtatacagggatgatacgttatcttattcgcttgccacgcgggtcagcaacctggaattcggagacgcgcacgaatgagggcaatctaagccgatcatagtacaattacggggtatgacccagacaacgagagtccccatggggagaagctagaaaagtctgcgatgcaaaatgacttaatggcatgatttttctatattgtccagtggatacagcttgatgccaggcactaagcccacagtctttttccgtgaattctttagtggcattctttgtcttttttatctagacctttctataattgtttcgtaaacttttctgagaactttgcaatctcttccggtatgtgctttgattcggatgactacatctaccagtcacataggtacgaaagtacgcttactttgatgttagtgtcttacccaagaacatatcccggattatccacgcggggtgtggagttgaaaaatggaggggaaaaatggggaaatccccccacaaaaatagcttttctccttgaacttccttgcaagccactgaagccaggccggccgtaggtcggtctcggggtttaatcggctgttataagtattgtcaccggtcttgtgtgctaaactaaggtagaacattctggactttgttctttttttggggaagagacacttactacatagctgctcacgatatagtgcagtaatccatcctcccacactctcagattgtcctttcaatgattcagcccaaggttacttggcagggcttctctgaagtaagactttgcccaggtccatgggtggatagtagactgccaagaattacaggggacaatgcgttggccacatggtcggcttctccccgaacatcccaagtacggggtacggggtactcgatacggaggatacagaagagtgccttctaggcgtactttgggcatggcagtatcacactcggcatcgcgaactgtctagacttactacaagatccgagatctcagccggttcttgcctatagtgccgataaatgccatgctattggcgagaaagctttttatcaccgcgctcggactcggacgcttggattaccctgcatgtgaataaattgggctgaatccttcgcctttacttggccaaggtccccagttttttttctttcggaaattatactccgtatacccatattccgtaggaatttccacttctcggaaatacaagcctgaatgggcaagccgttgatagatacgccgcgtcgcggcggttgtcgatctttaatttattataaaccgaggctggggaagtttcgccgcagataacgttgtgcggtttcctcttgtcttagactggggaggctctttgtgcgagtaaggaaccttggaaggttccaaggttcaatgtttcaacgttagcctagtaatttagtcctgacttggttccatggtagcatatttgctgtcttacagtatacgatatgaaagaagttctcaaacgagcaagtagggagacgcatctagattcgttaaatgctctcgcctccatcttaataggcattctcattgtcatcatcttttgggaaacaggaaacaccgactatatgataatgctggattggattgtaacagctgctccgaagaatttggatagcttgcacggaaagtaagttcttagggctaaaaatcaccgccttggctgtcaattgtgttttctcttcactcgtacgcaggttgttctacggagagatactaggtagagaacgcgtgtaatagttattgaggattatatttacaaaaatagtcggccgggtttgcggcctctttccttagttggctcgatggctgtccttttttcctacttatattctcccccttcgtgggtttttttttagctgaacggcagaaaaagattgatttgtgagctcgatctttctatatctaactagccctggattatggaaaaaatattgagcttagtctcaaacttttaatgcgaaatcagctagccacttgggttggaatcattcataggaaataatacagctcattaccaggaggccataacaaaaacatccgttcttgttaaggcccagagggaccatatcatagactgacactatgctttcgagcctaccttttttactaaaacaccataagcatagttgggcttacaagctcatgaatgacccagaaagctagttcacattcaggagctcaatacgcattttggattgggatagcatcagtggaaggactcatgtccctgtaatggatgctgaagttatagtgctgcagcctgctctattagaagacctgaccgaaatcttcggactcaccaagtaccatcggcttgactgtactcggcaggtctaagtacctagctcctccctatgctgtttgaagaccaagttgtttgattattgttccaatattgagccgataatatcgccgaacactacgcagttaacacatcaagacagtgcacttttggatcagcatggatgtcgtcgagtttggaggacatgatgaaagtatagtgaacttgatatactactaccggatcattgccactcaagtctctctgatttataaataggtatctaccaaatcagggatgctccttggttccctgtcaactgcggcccgacagtcttggcattgactggcttccagtggcttggacatgtcaaatgccaaatattgtgtaggcccacaatgaaatactagatcaagacatactcattggctatccaattcagctgaagaaaggctaagccacattctaagatgacaaggaagctgcgtcgatctgaaaccctcctgaggcggtgctcaacgctcagccccgcgagccccgccaatgccgtgtatttattgtcaggtcattcccagatctcaccttcctatccagttctcccaagtataactatacctatatatcatccgaccaaacatctacctaagaaccaattcttatttcctcgatatcaacatgtcgtacggtggaccctcgcagaatcaatacggtggtggtgccggttactatgaccagcaaggccaaggataccctcctcagcagggctattcccatcaaccacagcaaggatattacccaccagaggtgagtctacacacacgatataccgttgcacagaaccgtgtcacacagcgctcaaaccctcactctccactcgtactcgtaccgcgagcatacataactaactttccgcgctacagggtcagcaggcttatggtcagccccagtacggccaacattcaggtccttatgaccaacaaggcgggcagggctaccctccacagcaccagcaaggccagtatcctgcccaaggcagtcctggatacggtcagcctccccagcaacagcactacccgcaaagtggtggcggtgagagctcctcatactacggtggcgcacccccgcaccaggaaggacagcccggtgctgtaggaccggagggagaaaggggtctcgggtcgacactgcttggcggcgcggctggcgggttcgtgggcaataagcttggccacggcctacttggtactgcgggcggtgctgttttgggtgctgttggtatgaatatggcaactaataagctgtgagtgtccttcttatcattatatcttgtttgttgtcttttggatcgagactgactgttgatactctggtatagtgagaagaagcacaagaaggagaagaaagacaagaagcataagaaggataagaagcacaagcggaagagctcatcgagcagctctagctccagctcgtcctctgacagcgactaattggtctcttttttttgggtctgattggtcaccatgacttgttttatcctttacattttgtataccctgtcttgttctctgctgctttttccgttccggtaggttcgttttggcttctcgtcttggggactggagaacctgtatgcgttacgtttatcatatgcatttgtattctcaatgacatgacagctcatcaacaaagttgaattattaaatcaagcgattatgcctttattgctgacatatatgggaatgcttgttagctgcatttctgcccgacagatagccctttgtttcagttcgcagagcagttgaacattgtaatgactatggccatgagtggcatccagatcgtatgttattaaattggttaatattttgttattgaaagtcgccgcgcttcagcttcgccctagccggaaaactctttgaaaaaagcctctgggtcgatgctactgtccagatcgaacgacagccgggggacttcctttggtgaatcccacaaaaagcgccacttctgtgatatcggattccagtactgtcggggtacaagagcagacagacgtctccattgacgacgcataagcctgattgtaattgtatgtggtcgaccattggcatattcggcaaaagtggtacctttctcaggtcccctggccagcaacctgaagagctcgccaccagactcggtctggaaaacctggggctttgaatttctccttttgacaggctcccacggcacagttcccgatatgagtccctcgagcgtctggagatccttctctggcaatggcggaaggagactgttcaatgtgttgttgtaccattttttccgaatatttttcttccgacactgggccaattctctgccccagctgtcctccttaggaattggaggttgaaattgtttgattaacggcctgatacggactgctgtaaccactgggttctgcatttgagagattgcgagattcttcacgatagccgggggttcccagccatcactgaaatcaacaggctgggatattagctctttaagagccatggagtcattggggatttgcggcgttagaatttttgccagcagctcatgtcgccgtctcccagtgcgaccgtatgacagtaacagcaccttctcgagaggacgtgcatagccctcatttgctcgccgcagaaccgacaacgcatttcttgccgcatgaaccgcctgaggaccagccttcggggaacgagaggagacagcacgatatcgggagatgatatggtctttcatgtagttgcgagcgatggggtcaggtaggtaggtacattcgcgcagcgtggcgcgaaacaaatggcgccattggtgtggttttgagagattctgtacccaatgctgagattgcggtccggccattaggaatagcttatctgattgcaagaagtgcaaagaaaaagaaccccaaaacggaggaacgcgaaatccttggcgaaatgcgtgtcacgggaactccgacgcgccattttcgccgtctctcccccaaaccccgcgaacattgccttgccttgcattgagcctcatatcttaatactagttcaatttttactttgacacttcgcttcgttcggtcgctttctggctttgaatgttatttggtctggcctacggtttcccttcagagggttagccacgcgcctccttgagctcgcgtcattccaatcggcatccggtatctctccccttgctatgtactttaccccatcattacccgatttgtaggctgatattccctaaaaagcccagcatgtcgtactcacagggcagtacagggtcgaatggaatggcctacaacatgttgaatggttcccaatccctctcctccacccctcgcgcaactcctccgcccccgaaaggatctcagatgtcctctttcggttactccaacggaatctcacgaagctttggtggatatgatggaaccaatgagtatggttcggtaatgtcataccaggaggagtataaaccacagatttaccgagttcgtggtctatatccacacccacagagcatgccactgacgaggctcaaaaataggctgtctattctaatgttgctgtctatgaaatggaagtgaatggagttgctgtgatgaaacgtcggtccgattcttggttgaacgctacgcaaattttaaaagtcgctggtgttgtgaaagcgagacgaacgaaaaccctcgagaaagaaattgcggctggtgaacacgagaaagtacaaggcggttacggaaaataccaggggacgtgggtcaactaccaacgaggcgtcgacctctgcaaagagtaccacgttgaagaagcactccggccactgctcgagtacgatatgagccccgacggctccggagctcctgcgcacggatcaacgatagatacacccacgaaagagcaagcaatggccgcgcagcgcaagcgcttgtacaacggcggggataatcgcagcgcgtcgcagccgcagcagggaaccttcttccaaaacatctcgcgaaccgccgccaccgctgtcaatgccctcagcaaagcgcgcttcgactcgcccagctctaatagtcgtcggcccagcatggcgcgcaagccctcacagcagatgagcagccaggaatccgggcttgcattcagcagccagcagaccatgtacatgtccgacagcgggtttggcagcttgcaaaatcggtaccaggtgcaggatgacaacgaggatcttgcggaacctcctcgaaaacgcatgcgctctacttcacaccaaggcccccctattggtctcacccgagaaccatctaatctatctatgctcgaacctacaccaacagaacctaacgactcattctatcaacaagtggatcttcctccccctcctattgatgatggctcgaaacgcggcattgagtccttggcgcctgcttctactcccgagagattccagaagatgaagctcattatgacattgttccttgataaacgaacaaaagactttacgaatcacccggctttgttggagttgaccggggatgatcttgagattccccttgatgagtaccgaaacaatgccctacactgggctgcgatgcttgcccgcatgccactgcttaatgctttagtagccaagggtgtcagtatagcgcgagtcaatggtgccggagaaaccgccctacaaaaggccgtgggcaccaggaacaacctcgattatcgaagcttcccacgtttgctccaggtattagcccctaccattgacatggtcgattacagcggacgtaccgtcctgcaccatatcgccatgatggctgcgactggtggcggcggacatgtctccgcaaagcattacctggaagctctgcttgagttcactgtacgacatggcggtatcgccccaagtgcgaatggagatcatgccacaaacgggatccccggcggtgaagtcatgtctctaggacgattcatctctgaaattgttaacctccgcgatgatcagggcgatacggccctcaatctggcagggcgtgcgcgctcagtccttgtcccgcaactcctagaagtgggcgccgatcctcatattccaaaccatactggcctccgccctgcagattacggtgttggtgttgacatggtcgacggaaactctcaatctcaacaaccggctaatcggaatgactcatttattgatcaattggcgaaatcgaagaaagagatacttgatggtaaatatcttctcgcattaatcttcatccttactaacctgaaatacagcggcaatgtcccaaattagcgcactggtcgaagaaacacttgggggaattgaccgcgagttggcttcgagcttgacacaaaaacaagaaactttcgatcactggcatacgaagatccgcgagtctgcgaaggctcggcagatcgaacagaaacaatacgatgagctcaaacgcaggagttctgagcgcgtagagctagaccgacgtatcaagaatctggagcggtcatctgaggggctgttggtcacagtgaacaatacaccaggattggacgcgaccaagacggctgttatcggtgatgcagaccgagattccggtgttgatgtcgcgacatttgatgtcctattccctgagggtttcgacccagcttccggcttctcggaacagcaactctccttcctggctacactgccagcaacagatctgcttaggcgccagacacaatgctacaaagaattcaacggagagattctagctgaagtcgattgtctgaaagcaaagaacgcagttcttggccagaactaccgtcgcatggtgatggcatgcacgggctggacggcggaacaagtagatgacgccgcagagggcctcacgcaatgcgtcaaggaactgaatgacaatcccgtccccgaggacgaagctattgagattctgatgcgggatcgcgggcaggactggtagtttaaactgatgtgttgcattattctctgagcgtttaggcggcgttgcttcacttgtctacaaataccctgttggaatacatccatgcccgttggcacatgtcttgttatttacgagaaatgcaattcttgcacatttattcgtcttggctgtgtgtacgtgtaggctaaatgttgcaatattagccggtcgagttggctgctaggctaggtggcttgagaagcccatgttggttgccgagacatttagcccatccccgcgtttcacttgcttgcactttcggataaatagcctgctgcggataagtacttatagtcatgtgtagcacttccctattcatcattacaggcatcgttgtgcttttgacaattgccattacactattgagtacggagtactgaatcaagaatatggctaccagcttccttcacgtgaagggtgatattattgttgacggaaatggaaaggcagttgtgatgcgaggagctgctcttggagggtggatgaagtatgcaaatgatcggattgccgtatcattcccctgtcctcaaactgacatcccatcttagtatggagaatttcatcacaggcttctcaggccacgaagcccagcaccgcgccgccatgcgccgagtcctgggacaacagagatatgaatacttcttcgacaaatggctggagtacttcttcaccgaagcggatgccaaattcttcgccgagttagggttgaactgtctgcgtctgcctttcaactaccgccactttgaagacgatatgaatccccgcgtgctaaaggaatcagggttcaaacatttggaccgagtcgtcgatctggtcggtgtttcacatattcatctgcatgggggtagcgactaatctcgatagccttatagtgcgcagcccacgggatctataccatcctggatatgcacgctgtccccggtggtcagaacccagactggcattctgacaatcctaccggctatgctgctttctgggattacaaagaccaccaagaccggactgtttggctctgggagcagattgccgccaggtacagagataatccttgggttgctgggtacaacccgctcaatgaaccttgcgatcctgagcatgtacgactacccgcattctatgctcgtgttgaaaaggcaattcgcaatatcgatccgaatcatataatgtggctggatggtaatacgtttgcgatggaatggaaggggtttgacgaggtgctgccgaactgcgtgtatgccatgcatgattactcagtgagcttcacattcctttcgaggtcgtgagataagggcgttcttgttctaatacgatataatctctagtcaatgggcttccctaccggcgatcgctacaaaggcacaaatgaacaaaaagaacgccttgaacaggggtacctgcgcaaagcgcgattcatgagcgagaacaagacccccgtctggaatggggagttcggacccgtctacgcagatcatatttttgacttcgatgccgagactgttaatcaggagcgatacaacctccttggtgaccagctgcgcatctacgacaagtataacatcagttggtcgatctggctctacaaggacattggtctgcagggtatgatctacacgaatcctgcgagcaagtggaacaagacgatccagccattcctcgagaagaagagagcgttctggttggacaaatggggtcgtcggcctgcgccagagccggaggctgctttgaggccgttgcttgattggattgatcgtgttagtcccactgcgaagcagacttatcccacctcgtggaatacggagttgcatgtcatgcgcaatgtgttttacactttcttagcggcttcgtttgtggatgagtttgctgaattgtttcgaggaagcagtgagaaggatctggaagaactggccaggagtttccactttgagagttgtatacagcgagagggtttgaatcgcatactcaaggatcacgcacatgggtctcattgattctgagcaagagtcagcttggtatagcatactataataaattggactttcacgactgattctagtggcctagagcctggagggaggtggtgctctataagcagagtgtggcaatagtatccgttcccggcgatattccggcttctacttaaataccacgcactattgttatccacacactatcgataagccagaaaaatcgaaaaagaccgcggggcacattctcgacttcgaggtctttaaaggttactagagagatttgacatggctgaatctcctgcgtatccgtccaatctggacagcatatacgatgccgcatcatctctcaaagaccgcatcgatccaatccgattgacgtcagacaacattgtcccgatcctcaacctgcccctcactcacaaggtgctgggccacgacgcttcagaagagtcccttgcacaggttgcaagcggcgagatctcctataccaccttcgtcgccgatcaggcccgcgccgccctccggtctagcgatgacttgactacggaacaaaaacaatcgcaacttctgcatcttggactagcagccttgttcagctttctacagtccaacgttaccggacctcccctcgagttcaactccgcccaaattatccttccgtccaccctgcaaagcgaacgcacaaccctcaaagccgtgcgggcaaagatcatccgcgatctaacactggatggagaagctgcgtacaagctcacgcctaaccctgaattgttcgctgtcgccaaggctctgttggttgatgcgagcagcgatggaccgcttgtcgcaaagacggcgcacatgtgtatcaacttcctctaccaaaagatgttgtcggaggtcacaagtactctccaggatgtgatctacaaggacgtcgaggttctgagtaaggccgatttggactcagacgaaaagggtcggttcctgctggaaagagccagtatctatatataccacgggttcgacgttaaggcatgggaagatattactcaggcggccaaggtgcggaggttcgaatttgcgctgaccggaaagatgggcaagcgtacaaagttccaagaccgtgatatcagtcaactggtcgtgttggctaagagtgccgatgagacatcaccatcacaatcttcggagccttctgggcctaagaacctgaacttggacgacgacacccttctcgaggccatctctttctctgatgcgaagcccgatgaataagctttggcgatataggacaaagtcttaccagctttggatgctattgatgccaacaatcagcctattctcaaccccgttgactctgctcttctactcgcactggcatctgccattactaatacctcgcctgagaatggtctcacccgagaggaaacaaacccctacgccattcgagtgcttgatggtggtagctccaactggcagatctatacccaagcacttttggtccgcagtcgagtagagggctaccgttcccgtactgttgagagagccgtgctgcagatgcaggctttggtggaccaggtcattgcggataccgcaaccagcgacgacgcagctcagaatgaatcaggcgaccctacaactttcctgccgcgccctgagcagtctgagtctgccccggccgctgacagacttgagcacatctggatcctagacttctcaacaagatggagtctcgaggctgagcttgcgaagcgctgggttgatcttggtggtctacgcaccgcacttgagatctacgagagactacaaatgtgggccgaggccgcgctttgctatgctgccaccgagcgcgagggcaaggcgaagaaactcatccgccgccagctttaccaggccaccggcccagatgaaaatgacgaaaatgaacaattcgaaggaccagagcggtcaccactaccagcagatgccccacgcttgctctgtatcatgggagatatcgacaaggacgaaaagatgtacgagcgcgcctgggaagtctccggggaacgatacgcccgcgcccagcggtccctggcccgccattatctcacctccacaccaccggaattggaaaaggccgagatagcctataagaagagtttgcacatcaaccgcctgaaccacggtgcatggttcgctctcggctgcgtgcagctcgagctccagaaatgggcagaagcaaccgacacctttacccgcaccgtccaactggacgataccgacggccaggcatggagtaaccttgccgccgcgatgctgcgcatgcccgactcggagcccgccccagagattatcgacaaggccactggcgaagtctccgccgccgaagtcgacccctacaagcgcaagcgcgaggctctatcggcactccagcgcgcagcgcaactaaagggcactgacgcccgcatttgggacaacgtcctgacagtcgcagcatctatcccgcccccggcaacaccattccgcgatgtgattaccgcgcagaagcgcattatcgagctcgtcggcacaaagcagggcgaaaagtgcattgatgtggcgatcctgagcatgctcgttgacttcctgaacgtggcgttcgagtacgaggcattgcttatccgctctgacgatccatctgaagccccgattgttcgcaccggtactattcccggccagatcatctcgctgatcgatcagaatgttgtcccgcttatcacacactctgcggttctgtggcagattgttgctcgcgtcgaagtcttccgtcatcggccgtctaaggcgttcgaagctcacgagaaggcgtggcgtgctgctgttgctgctaatgctcaaggtgctttccagatgggtgatgagaagccctggcttgagattgtgcgggctacagagaaacttgtgagggatgggtatgctaagtttggtcctatggaccgtgaagatcagaagattgagggtgaccatgagcctgagcttgttgcgaaggactggcggttcaaggctcgaagtgccgtaagaggaatcttgggcaagggcaaagaattctgggatggcacggaaggctgggaccgcttgaagcagttgcagtctgaggttaccgccaattagtacatatatcccttgatgctgtttatgaatgatatagattagctcgctcatatggcaggtgcaatgcttacaaaagtcatataccaagttcaacattattcaaattccctcatcttgattgataaatcaaggctattcatagtcacagctagagtcataatcttagggaatcattttgattccaactttctcttcaccatcccgcaaaagctctcgaacaagacagtgtctgtcccctgggcccagcgaactaaaaccttcacctctctctcgtccggtttctgtccccggaccaaccgtatctgcagacgtacccccagcgccacctggtccggaatcgccttaaatttagccgcaccctcctcgccggcaagtttcattttccgacgtgcgaatctcgaccatacattctcagaagcgaatcccgtcccggcagaacgtgtttgattccaggtccagaaccaaggcaacgaactgagttctgtatctatagtcgcagtggccgtgtcaatagacgtgccaggtggcagggtgaacgagtactccgaggggaaaggaagaagatgttttggacagcccgggttccctctcaccacgctctattctagaccagcggttagacatggcgcacaaagcacagacgtgaacgaagtgagttagaggtagtaaagtaggacttaccatggcaggccttcggtctcccaatgaccacgccacggcccagcgcttcgtcttgcttccctgctcgaactcggtgacggcgaaattggtgattccatgcttgatcagcatctctacgagtacgttgatactgctcaatttgccgagcatggatgtgtaccactggatgcggtcacgcagctggagactctcgtcgatcatttgcttcacgaaagccacttctcctccgtgagtcaccatttcaacttccgcgccggtgcaggtcttcatgtaagttagaacggtatggtacgtaagtggaatgtggtggatggtatatggctatttcgtgttggaagtgaagcagtaacactcaccgaaaatgggtctcgttctttctgctcagcagactgcttcagctcattaggcgaggcataaaagggtgggttgcacatggtaaagtcaaggctggttaatggtcaggtaatattctagcaagtcttaactggagggagactcacgtttggtgacctagcttttctaacgggaataggggtccgttggggtcagaatttacaatctgaattcgtgatctaagattgttcagagccacattatgctgggaggtgcggatattgttcgagtcgatgtctggttggtcagtggatgccgaatatcttcgggctgaaggacatacctgttgctacaaatttccaccgcggccgtgtcgcgcagcccagaagtgggtagatagcgatgcatcccgttccgcttgattttgtcagacatgatccagagactggagggactcattacttacatatcgagcccgacgacctcccggtcccggtcatactcctcatgcagtcctccggcggtggagtcaaggaggtcatgtagccagaggatgtagttgagtctatgctacatgtcagacatatgcgtataggatctaagccgtcattcgggatgacatacctatttggtacctaaaattaagtcaacacgtgtccgtcagaatatttttagtatctgcataccggtggacacagtcgatcctcagggatctcaactttcaggtcaaaatcttgttgcaggagggtggtggtgagttgtctgcatgatgcaaatcagatccactcccgaagttagacgttagagtcctccaacttaccggacggccgctggatcagtaaagtcaagttgtccgtttggtttcaagctgtattcgattagcacttgtctttctgttagaacagaggccttttcacgtactgcttggcgaagtcgcgcgattgcagccccaaggctgcaaaatcgacgtcatttttgtagaggcttcggacagactccatgctatttcgtggagtttctcagtttacttgatattatcgaaagaactggaatgtggccggtgaaaagcaaagcaaagtccacggcgcatagggaggccggtgttggcaagcgggtagagaaggcgaaagcggccatctgaaactttgaccgcgttgatgtattaggcagaaaaccatatagaacatataactatgacctacgccaatacatgtaggttccagactacataattgatctcaggaagaaactgatatagcaaccagtagtgacagaggtttaaaataaagaaatagcagggtctatggaagatatatggataccaattaagaaggcggaggggaacgcggtaggttgaaacgcaagttccgggtggctgctatcgtcgagcctcaccttacgtcacccttatacgggcatataacctcaagaaaattaaagatgccgaagtgagatgctacccagatgtagtagtatttgccattttgtaaagacgtgtatgaaataaaaataaaaataaataatcgccaaaagtatgagtgagaagtgaaaccatgtaagcaccgctttttactaccccaaatcgtcaagtcgtgataggcccaattatatacctttcccccttctattcacaatttccccccatttttccattccagatatatcgatcgttttcatttagacggagctttccttcttcaaaaggcgctcttggcgctcaagacgccatccatagccccacttcatctcaaccatgagaagagggaccgtggcgaggataatgccagcgagcatgacaaatgcaaactgggcagtgagagcatcaatgatagcctgagaagccgcgacaccagcagcaccaatgaagcatctcatcaggttgttgactgccgttgcactagcactagcaccggggtacaagtcgatgacgagtgtgctgttaatggtgaagatagcggtggagccataggcaatgaggaattgtaggataattgggactgcaaggtgtgtgcggagggatactccgtagacggcgacacagacaatgaagatagccgtgatccaccaagtgttgcgcatgcgggcatactcgatggggaaatcggggtagctctttaagctgatgcgagtatcgatcggaaggttgtgttgctgacaatattcacgttccgttcgcttgtgattgtagtccatcaggtatccgattgtatacgagccggccatgcatccaaaaccattgccgaggaaggtcaggccaacttccattgagttcaggccatattgtttttcgaataggtccgatgtggaggatgtcaccattgaccacactgtgtacacaatgctgccgaagagaagggtgatgaagacatccttctcgcatagaaaggcgaggggtgctagcacggtctttaaggtcaccttacccttctttccgcaggggattgaaccttcctggacgtctttctgtccgcaaatggagtagatgactggcttgtggatgcctttgaggggaactgtgccgtttccagcgatagagcggagtgtttcggggaggaaaaacatgatagacaaaagactgattccggatgcaataaccaagaaccagaagatagatcgaaacccaaggtattgagagaggattccaccgaatactggtccaactccttgtcccaacatgcgaactagatactgttagctcagaacatagcagtgtatccaagcagcaggctacttaccaccaccaaatattccaatcaagctgcctcgttccgctgaggtggtaatatcaccaatgacacccgcacctaggaaagttagctaagacacaagacagggatgattaatgtatcataccaattgagatggtggctgcacttccggcagcctgtaaagctcgaaaagccatgagctcgccatagttggtagagacagccaaagcaatgttcgaaataatgtatacactaaatgttccaacaaaaatcacacgacggcccaatgcatcagagaaagaaccccagaagctcggggcaagaccttgaacaatcatgtatatcgtgatagtcaaggtagctagagacatggagatatcgagttcctatattgccgtcaacaagtggccaaatccatagtgctcaagttgaccaacctttgcaacttctgacagtgcagggaaatagatgtttgaagatagcggcgagaaaatggcggcgaaagagacaataataaccattaacaatttgcgagaccgagtgaacacatgatatggtggttcttctggggcttgggcttcaagattgattgactctgctggtgtcgatgataccgagaatcctttctcatattcaggcgagagattagggcttgagttgaccgactggtctgtaacctcaggatccctgagggtttctgctgaactgtagtgggacaaagtcatggtgaataattattatagaatatgaagacaacactggctgttatcaacagatgcaaatcattgagaatagaatataaagtatggcttcattcggctcacagttttagaggtatagaaagctaaatgatagaatggagacatccttttgtatctcaattccagcaggaaacccctatagggcatattccaaaatacaaacaatattaggagacccatacatctgagagtcaaccaaatgtactccacagtgggttcgactaggggtcactataccctctccttgatagtagaaaatggcacggataatacttatctggtaaccccaatgtcgctcaatttgatacatacgggccacgatcagcagttgaaatactcgaggttctaatccacgagcttctagaatgacttacaccactagtctagacggctacatgtctattgtatcatctctagtattagaaatatgacttctaccccagggaaatcatatttctgatacttctgggagctacccacgagaggttggggcctggttaactatggataaatagttttaatacctaagttcatagggcagattccagtacccactgggattccttctagactccatatacgcgtaatggaatcgatctgcatataatatgcagcacgcaggtccggtttcactctcaagacttggagtcggaaaaaatatgtcggggaaatgttgcttggcactcgattacttttctcgattcaactccgcagaatctttcgtttcctatgttgtaaaggccccgaaagtgtgcggaattagggaggtgataaactagttaaccaatccactaattgtttccaaagcagcagcggatagatatctcgagtacaggaaaagagaagctgaaacctgatttctgttccagggtctcattttccccacgtgtcgaatattagccattttgataacatatatgtcaagcaaatgccaagcttcatcatttaccctggtcaatattgatacaggtgagattattgggcagaatacgccattgaattacgtgtgcattccccttgaccgatctatataggggatcttaacccttgctgttgacaagtcgtcaatcggggacccacaaagggggcgtctgactacagggcttagcatcacaatccaatgacatgcattatgattccagatatgtgatactgcctacaataccgagtacattacggagtataattcatacagaggccggtcagcttggcgatcatatcctgtctagcgcgaaccttgtcccgagagaaagtcatggacgaacttcttctcctatacatatatatctagcaatgtagctagctgcattggtcagtagcttgccgggtaccatacagtacatagagagtacaatatactaggtactgtgcaagcttttctacatagattatagcttagtctttctatctgactccactgatgcgacacccctagaaatcttagcggaaccgccaagagttcgtcgtcgtctgcggttgatcattgaattgcacatcgcttcgtaattgagcgtcgactttacactttcggggtgtttttttatctgcccaacctccagctcggttaaggctggccagggctatctacccctgtaaggctgatacagcttcccatcttggcagcctgatagaactcaattctttatacctcagttttgatgcccaatgccaagactctggtttcacggcaagaacggtctcctataatctactccgtactccgtaactccttcgctgctgcggatgccgattctcgggtacccgatatggactccgttagtgcacgttagatacatgcagtgtagttagtttcattagtagattggcctgacatggtgcaattccccacttctaaacaatattgggggtccaaaccctcaatgtgattaggttatagcttcattttcaagtctccgagttattgtggtgttgaacgcctcgatttagcatattatctgtcaacgttgtggccccaatgcaagtttttcttctttttcttctagctgtggaatagagaattggatcttaactttcgaattctctcaaggttccttgaacaagaatttctatacactttactttcaaatttgggagatatggtagatccccctgacaggtatgacaatcttcatctgaaacacagtatacggagtaatcatatggatctaacgatactagcggagaaaataaagatgattgttacgaacggatgaggctgtgtctgatctatttgcctggcgcttcaataaacaagcgctttgaccatgggatttgcagatctgatgcagcccctggctttcttggcccgctaaaggaacttgacacacacaagctaactaatataaatgataaaggattccagagtgttccacgaaggttttgaggtgatttaccgcaaaggaaccctagcatgtcgttatcgcatcaaacgacgtcctcggtgtcctccgtcaaactgctcatcattttgtcttctcccgcctaagtgtcctctattaacagcaacgttacaagtgcctctcaaaatgaatgtaatggaccttcttggcatcatgccgggtccagaacaaaagacacctcgtaagtttctttcataccccacagggcagggcccttcagaacgcccctgatcgtcggcgtatggagctcgtgtgtagatctggcgattgagtaagttgttcctatgttgtaactagttagttacatatggatatcttaatttgatagtactgggctgtggaaatgtttgtttcaggataaccacgctatatgatataatgcactacccccccttgtgaaacatgctaccgatattatagaagaccttttaactatttagacagtatctaatggcgttatataatcaccatggtttaaaccgaagaaagtgacctaattgtctatgtttaatagcaagtacacgttgttctaggatagagttatcaactctgcttcggatgaaagagaccacagagacatatccagccagttttggataaaaatatacaagatttcgcaataaccagtggatatatatctcacctaattacggatgccactagtcagtggaagtgtagctataaattaaatattgagatgcgcgagcgaaagttcttgacacggcatgattgtcaaacggtttattatctctatcggatagatatgtcgcacctctaattcttcgacggctggggatagaaaatcaaagcgagacttccattcaccgaagccgtccgcattgttgatcacatttaacgcacagatcaatgtatgcgcacaagtcacgaagtctcgcttcccaaatgaattgatcgtgctgataacaccgtgaacatgcagttgggatccggaaacctttgtaatccattaagagatcaacacgatcgacgaagctttcgcgaacgtggacttgaacatgaaagacgctggaagaaaggccgggagcacgtatatcgggtgaactcgtaccatgtcccgaccaatgacaaggtcctggtgcgaaatttcacgaaatgtatgccaaatcaccagccgatttggacgtgtgttgagtaacgaggctcggctcggatgatcgaagtcgcaactcacgatgcgtgagagatcaaggccggagcggacatggcgtgtggatcatgcagccatctatctcttgtgttgaagtagcgtgggtaggcaatgtcacctaacaatgggagaagaccccatcgcaaatatcgtgatcttagcgcttgtcccctctgccaccaccgcggccaccgcctcggccacctctaccacccccgccgcctctgccgcctcttgttttgccctttcctctcccacccatcatacggcgccctgacgcctggacacgggcgatgtcgtctttgttcaggttcaaagtgcctcctgagaacctgcccacggaggatccggcaagaccccgctctcttcgcccgttgttgctcgatttatgtaccttgttaggcttctcgaggatgatgccgttctccttggcctcttggcggcgtctatcttcctttgattcagccttggctttgatgcctcttcggtgcgcagtgggcattttagtttgcgcatagagcgaagttttggctccgagggattgcatgcgcatatccaaagccttcaaacggttctttccagtgggcgccagatcattggcagagtcaagaaggtgtgactccttaagcagtctctgcaatgcaagatcatgcttgaggtttgcagagtcgtgggcgtcttcttcttcttcttttttggatgtaggctctgggtcggcgctcggcttatctaagtcggacaacagttttccactctgtaggtctcagtgttagcctggcccttcaacgcattgaggcctagcacgtaccataaacgccttccaggtcttcttatccattctgtcttctggtgccgcgtaggcatccgtgtgttcgaccacctcaacttgattgctttcgtcactgatatcggacaccccatcccagtcaccttctgactcagagaaatcagagtcatcgtcttcttcattccctatttcagtagatttggcggtaggagctggcaaatcaagtggctcaaattgtgcttcgaatagtctgcggaatacgtcctgcgcattgtccactggaggagggctgtcttccttggtttggggcttagaaaccacagtggtttctctttttcgtttcacaaccatggtgaatgtgctatcgactaaattgtaaaatcgaacactcgcgtctcgacccaaaagtttttcggacttagctcaaagtcacgtgtgataagatacgccgcccctcgatttacacatccatcactgaatcaacttgttctccaattagccagaaaaaatgactaaattcagaccgtgcattgacctgcattcggggcaggtcaagcagattgtgggtggtacactcagccaggtggccgcagacctgaagaccaattacgtatccaagtttccggccagccactatgcgggattgtatcagaagcacgatttgcgcggcgggcacatcgtgaagcttggacctgggaatgaagaagcagcccaagaggcattgcagacatggccgggtgggctgcaagtggccggtggtatcaccgataagaatgcgcaatattggatcgatcagggtgcggacaaggtaagcccccggattccagacggattactatttcttcgcctgaattaggcttggttgagaactcaatgatatatatgcttttatttttacctatttgcttgcgcttcgtcatagtaagagtccaatgacgctaaccatgtggaatgcgggcaataggttatcatcacttcattcctcttccctgggggcaagttctcgctcgagcggctggaatcggttctttctgctctgggcggcgacaagtcaaagctgatcctggacctgagctgccgcagaaaagacaatacttggttcgttgcgatggaccgctggcaaaccatcacagagatggagatcaaccagggtatgtcctacctgcactgaacctaggctggttcttagcccactgacattatgtagcatcgatcgcaatgttggaaccatattgcgccgagttcctaatccacgctgcagacgtagagggcctgcaacaaggcgtcgatgaagaacttgtttcaagattggctgaatggtgtactatccccgtgacctacgcaggaggtgcacgccatttacaagatctcgaaaaggtccacactagtagcaagggaagagtggatttgacgattggaagcgcgctagatatctttggcggctctggagtgacgttcgatgaatgtatcgaatggaacaaaacgcattaaaatagaacataaatcaaaatgaatagatcaaaaatattatgatgacccaaatagtatattcctatatctatttcatcaaagtcgtgacaacaaacagcaaggaggagtacgagtcacagttgtgtctagacttgtcccaaaggggcttaggggcttttatcaactgaaggtccgcccgcctccgtcttcaacctcaacttctctgtgtactagccgagctgcgaccacctctttctccgacacagtacctatcccgctctttttgaagcactccttacctagcatcaaaccgccaacatgaagcccgtcgtctctgccttgaacgcctggtcttggtacgctccccatcccaatatccatcgaaacgttctatcgctctaacacctcgcttctcgcacagtgtcattatctctgctttcgcaatcatcatcctctcggtcctcggctcgctatacagcgtacgtctgcccgactctcacttacccaagacccacgaagacccattgtcccggacatacgtaatatggggatcagccgctaacgcgaagttcccaactatagagcaacaaccacgcatacaccggatcggaaggcgaacctgaagatggccccgcagtcgccgcctctatttatatcgctgtgatggtctacgccgtacgtcactccctaaaccctaggctccaagctccgacgagatcgttcgttgcatgagaaatgaatcggttactgacaatgcgcctctttggcttacagggcttcttcgttttctgcggtctccaggcttaccttcacatgcgagatagtaggggaggtgctatatcactgcattaaaattaccttggttactttacattcgatgtcttctaacacgtttatctgtcgattttcaatctttgagcttatatctcgggattttgagtacaacacggtggcttaaattttatgcgttgggcgtgatgagaccgagagataccctaattctctcgagtatgaatcactcatgttcactctgtgcgacccagattcgtctatgttacagatgagcaggatcagactaaacttgaaaggcgttggcgggcaggtttcccggtctcctttgctagaatacacagatagccgacctgcgacttgtacatagagcgctcataattatttccagctctttgatatttctttttttttttttttcgcccattagacggacgcatctaaagataaattttggtatagacattcaatcatttgtccttcgttgagaaatcaagttttgtaagaccgccaacgccagtgaatgcataatcagatgccgaggctcagctggacacctgatttctttttcgttttctttctcgttttgtttccctccaggttattactcctcatcctcccatggatccaacatcttggacatgtaaggaccatcaaggtagtacccgagacgagcatagtagctacgcacacccacaccggagatgacgctgatcttgcgactaccgtgctcctcgcgcgcaatacgctccgcctcctccatcaacaaagttccaaatccacggtgctggaacttgcgggcatcacgtccgtgaagcggcacagccgaaccatagacgtgaagctcgcggacaatactcgtctgctggccagtgaactcaggacggaaggtgtgcgtctcactgcacttgcgcagacgaagcaatccaataagaatatcctgcttcgggtcttcgtatgcaaggaaagtctcccatccgccattggcggtgtagtcacggcggatcaactcaatctgtgatggacgaatcttgttcttgacttcgttgataccgacttctcgcgtgcggacatcgcggcaggtcgtgccaaagtccttcatacgcgccaatgccagttcacgcaagttgccgttctccacgccggaggtgacaagtggcatggggatatcgcgctggactcggtagatacgggtccatgggggaactagggcgagaattcgtgcaacaaggtcaatgagtgcgttgggtgtgtagttcttgtaacggccggtacgccacagttcgtagaggccggtgccgcggatgacaagagtgggatagagtttgagaccgtcggtacggaagttggggttctcgaagtactcctggaattggaacagatcgcgctccatcccaacgttcggcaggtcgggcatcatgtgactgacaaccttgaacccggcatctttggcaagcttgaacgtttcagctactgctgctacggtgtggccgcgattggtgtctcgcgcaacgtcctcgtacagactctgtacaccaacctccaaccgcgtgcaaccgtagcggagcatgctgctcagatgtgtatccagacagtaatctggccgagtttcgattgtgatacccacacacttcacgttgctcatttcgcctgctagcacggcctcgtcaacattgtccgtttgatatccgctcagcgcgttgtgaagctgggagatgaaggtgtcccggtaatcttcgggcagcgacatgaaggttccgcccataataatgtattccaccttgtccacactgtgaccgagagctttgatttggtctacacgtcctcgtgcctgctcgaacggatcataacgagcgcggatcgctcgcatcgaggtcggttcatatccagtatatgactgagtggagtattcgaagtcggagtctgggccaccggggcagtagacacatatgttaccggtatacgcgatgtgggggcatcgatgaggtttgcacataaccgccaccacggcgataccagaggaggttcctatggacgaggttagcgatagtccaacaccctcaattggaaaatttaaacgtacggattggctttgcgattaactttggtaagatatatttcttgtagtgctcaggcactgccgcgataatggccgtcagtggcggcgagctggacaagctgtgcttcttcgaaaaagtagcccgcaacttgttgagattgagatccttcttgggcttggtagagtctcggtttgactcataatcttgaatcagagcatttgcaatgtcggaacaagctcgcatgaatcgctcgttctcaggtacgttctttgcgttcttcttggcggctctcttgatttcctgcgaggtcatagtcatggtagccatggcgaagagaataataccgcgcctaggcgggaaatctttcaaaaaccaaaaagcacaagttggttatacttagtgggggtgaggttgattagatcgaaaaatgtggtcaccgaggtctgcgcccgaagtctgatccgcttaagtaaaataaattatgccgagcgaaaactcccgggtgtgtatcccgaacaccttgcccttcatccccatacttttctttctttcaacttacgtcttatacctcacctctcctttcatacatacaatcttgcagaaatgcaggccttccgccgtaacaccctctcggcccttcgaaatgtcggtgccacccagcgtcggactcaggccacctctgcctatagcgagaccttgaacaaccttaagatcaacaaggacacacgtgttctgttccagggcttcactggaaagcagggaacgtgagtggaattcccgcgctctcattatcacacaagtataatactgacatttgagcttgacatagcttccacgcagagcaggcaatcgcctacggtaaacattcatccaaccgcgatcgcatccaaacaatagcttacacaagacaggcacaaatgtcgtcggtggtaccaaccccaagaaggctggcagcatgcaccttgaccgtcccgttttcgccaacgttagcgatgccatgaaggagacaggtgccacagcctcagctatcttcgttccgtatgatcacacctatgctctccaaatatcaggaaaacaatgctaactacaattagtccctctcttgctgctgctggtattgaggaggccatcgccgctgaaatgggcctcgttgtttggtacgtggccgacggagcttccccttgtaaacaactttatctgacagcttctcgttcaacagcatcaccgagggtatccctcagcacggtacggatctatcgagtaccaattgaagccgcgaactgatcgatttatatagacatggtccgcattacggacattcttaagacccagaacaagacccgtctgatcggtcctaactgccctggtatcattgctcccgtaagctaccactccaactttctgcagtcattcaagcctcgccaattactcacgcatctcgttcatagggtcaatgcaagatcggtatcatgcccggcttcatccacaagcgcggtcgtgtcggcattgtctcccgttccggtaccctgacctacgaggccgtcaaccagaccaccctcgctggccttggtcagtctctcgtcgttggtattggcggtgaccccttctccggcaccaacttcattgactgccttaaggtcttcctcgaggaccccgagaccgacggtatcatcatgatcggtgagattggtggttccgctgaggaggatgccgccgagtggttcaaggccaacaacatccacaacaagcctgctgtttctttcattgccggtatctctgctccccccggccgccgcatgggtcacgccggtgccatcgtcagcggtggtaagggtggtgccgattccaagatcgccgctctcaccgatgctggtgtcatcgtcgagcgcagccctgcttccctcggcaagacccttcttgctgagttcgtcaagcgcgaccttgtctaagatcgtcgctcattttcatgcatcgcgtgtcttgttgttctggtttttaagccggggatctgaggtatatgtgccattttatacatggggtttatgggctgctcctgtattcttttttcctttgcgatagagatccttgaagtaatcatgctcgtgtaattattactgtctgctgtttttatagagtagatggttgaaataagtaaatatatgggaaccattcttttcaagtccgtgaagcaggcttcttggacggtccctccctcactatccacgactgaatcctcatacagacatccatagtaaaacaaatgaacttataagccagcacgaattgtacagaagagcagccgccatgcctcgtcaccgcagctagctgtcccagttctcgaataaagcgagatttgatgttagtccagtatgagccagggaaaggaagcatcgactgcaaaacacgcatcctgtcgcgcgctgactcactgtgctaatctctttcctagacaagtccctcgagaccttgtcgatgcggaatagcacacgcactcgagcatccagattgatagctcaatgtatcttagtgacacgagctctagagatcaagggaagcattcatagccttgaactaaagtgaacctagggagactaaataacgaaagaagctattatacctacaataggggggttgtattctttagcttgttatcgagattatttgatgagtacaccttttaatattttcttgtcctagtcggagagggtgaatataaaatgtcgaagcaagaacggttcaacgcgaaggctattgatatgtttgagattgtattccccggggccaaggctggtgaagagagaaccgagtccggatactcaagggggacgcaaagggactttgataaaatacataccatgactacttaatacggtaatattcaatacaatacagaccatgtaagatctgtagagaacaacaattccctaagaagattcgaatgtatgaactgatttatcaacatgaagtaaaataaatatccagtgaggtaccaagtaaccgagagagatagagatggagacacgagtctattctacagtaaaattctatgagagaaaggtagactgcttttccaacatcgtattaagcttctcaaattataccaaattccacatgtgattgttttccccaaagaaacctagaccatgctgctaccctctgatactcagccccgaagagggatcatcagtctagcaagttcggaagaccactttctatcttgataggggctacgtcccagcgactttttggcttctcgggggccccgttctgaaaggttgatggcacacacagcttaccattcgaaagacccggggctggcgacgaagaattgtcattcgataatgtctcacgcagacatgcaaccggaactttcaataccacaatacggttcttcgcttgagagccctcttcctcgtccatccatctcttcagggttatataagttcggcttcggccaaaattagcgcgatattctctgacgaatctcgattggttccagttttcgtgtaaatgagctttcatccacgcagcagccaccgatctctcttgatggtcggacttgtgatcggtccttcgcggccttctccgtgcttccgatatattgatcgattgccgccgtttatatgcacggggacgtaaattctcattctcaaagagcgtattgcatccttcccgcgggggacatctcgggtgtgatatgcgcatatccagctcgggggctttttgcgaggacctagggtccatcggaacggcattcccagagattgacgatagatccttcaagtgcatggggctcactgagacggctttttcaacgccttctggcagagaaacatgagatgttgacataatagcttcatcttctcctgttcgagacatcgaagacgaagttctcgagggcaaagaatttaatggaacagccatgtcaccagctagtgcggccttgcctccattattagagtcatttttcgtctgttgactggaactgtcgtctcctgtcccattttcctcctcggggcctttgttctctaggaccttgtactctgacatttcgtcccctgtctcatcctcactcgagtcttcagatgaactgtcgaaactcatgtcgccgtggtcttcggaagccatttccgatccgcttgacccattcagcgggcatgattgtgccgaacttgatgcacggagtctctctgggaaaaaagcggcctcaggctcatgcggtgtcaaatactgtgcctggtcacttgttggggtgggataagtcgtgataggatctccgaagggctgaagctcgctcaggcgtatcatcagtttttgtttcaacttttttagacttttcctatctgttacagtcagattgctgcttgcgtcaagtgtatgagtaggtgggagtagtaacattttgactcgtccttttcttcagcggtgacattatttaatatccccaaagtgatctccgcctccattagcgaatctgcgctgcttggcctcggactggaaatttggagggcatggcttcggcaaaactcgactctgtcgtgtacttgttgatcgaatttaagtactttcccctgaatggagcagtggtaggttccatcattttgtttctggaaatcgccgtgacgaacaatgtccaaccaaccaatagatgggctatctgcgtctttattccaggaagagggatcacagcccatatttatggtcagcgacctttccaaatcgtaactctgtagcggctgtttcgagaaatgctgtgtgaaggtctgagctgtctggaagacctcttcataagaccgaatgaagtcgcggcgatatgactggaggtcttcgaatcgtcgtattgggatgtctctccgcgacccccagctaatgaaatactgagagctatccatgttgttcgtctcaggcccttttgaggtcagttcaactcctcatactcggtgtctttctcatacaatacagtaatttgttccctctgttgctcataggggtttcgagggctctggtattgaaatatgacttttcctcaaaacagtttcaaagcggatatctgggtaaagaaaataacgcaaaggagaagggaaagtgttaaataataaattttagggtttctcgtatagcgtgtacggcgccgcactgttatcggcacccttataccctggtcactctggtagagcctgcatttcaacagacacactagagaatcgaaacatcgagtacggacatacgacgccccgcacttgtgtgattgggttcaaaggtcccgttgcggtgtgcccaccattacatccttgtcatacaggggtcggtttcctggtccgcacaggggtcggtttcctggtccgcacaggggtcggttttcaggtctgcacttgggtcggtttccaggtccgcaccagggtcagtgtctagatcgcagttttgggggctatctacatttagggggctgggagcaaatctctgctcctccgtatatgcccctcgttccgtacaaatccaggccagcgatgttctctgaatttcttcttgagcacaagtcttgacacagttttcctgacagaagtgtgtgtattccgtcctccgtatggagtacggcttcgcactttccgcctcttggctagattcattggtgttgttatcatctagattctgtactgccctatgattcaaaatagccgtgtttgacgcaattattgtgccttatcaaccgtcagatgtagctaatagaggcactttttacgttcagcttcattaacatatcgcgacggaggttgcatgatagacagagattactacaacataggctccaagcgtggtatatactacagcagttgtaggtctcttagttgggacttccgggtgactcgtggttttattagcgcagttttttctttgcaccatgtacttggctaatacttattatactaatgtattgtacatccaaggctttttattagcagtgcagctgatgctttccctttcgatttattaatttctcccttttgttgactttcgttgactttcgatgatcatcttgggcaaactttcacaagtaatatgccgggtataggctagaagccacatgatggacggcctaaggtcatagcaccgaatgtatacactagtggcgtcgcggtccctgcagacctaggctgcctaacgcacccaaaatgtacgaattcttaatgtgcgacggtcaacttgtcacttgtgtcgacgcagggaagtattcatgataccaatcctagatcaataaaggaagagagcaaaatcgttaaaagtcacgatatgacacgtctttttcaagggctataactagcccaggtgtaactctgatttgtcgatgagcagatggtactttgataatgcagtgaatgagatgaaattaggcgaaaagtaattctataattatgaaacagaagatttttttctaaaaggtagaaggatcgtacttttacttggaaaaatacgaagctgtcacatcacaggaatttggcggtttgataatgtatggtaccatacagtggtatgaacatgtaaatgacagtactgagaatttcaacttggaacggacatgctgacaaattgtaatgtatcgggacctcacctgcccggggttgataagtgagcagagtgagtcaagagacgagtgagtcacctaagatagtagtataaaagcttttgaagggattcgaattcaccactaataaacatcaattcagcatttggagtcctaaacaaaatgaaatcattggaatttacccttcccacggctttgatactgatagacaaccaatcaggcttctgcgatccaaagacaatatcttccacgctgctggaggtaatccacgtttttcactcctctacaactccggagtctccgttccacccttccaaccccgaacagggtatgcgtcccctagacttcgctacccctgcctcagatgggtcggagccggtcttttggaaaagtgtcaattcgtcttttattgggactggacttgaggcgcatttgcgtgaaaaggggttccgtcagcttatcattgctgggttgacgactgatcattgtgtttcaactactgttcgaatggcggctaatctgggggttgtggatcggtatcttggagatggacctgtccggttgagatcggatgggactcatgagaatgacttgaaagttgacaaggggcgtattgtccttgtcgaggatgccacggctacctttgggaaggctggaattgactcggagactattcagaaggtttctgttgctagcctcgatggcgagtttgcagatgtattttccacagaggaggtcattaaggctctgagcaagatctaaagctagcgtgatagtgctgaatttagtgagactactacatctcttccactcaagccccaactattttctactccgtaaatttcaattatttagtcttcttctcacttcaggctctatttcctggatgtctacaatgtctacgagtcacatcacagaaacctggaccgacagattgtctctctcatccccgtgtacattgtgcatatgaacaaaataaaaaatatcaattagaactgtgtggcgggttgccactacatataaacatagttgcctttgtcgtggacaaggatagatcaggtcccagggcgcctctgggtcccagccccctcgcctttagactcgggtcaactctcgcaactcccccaaacccctcatcttctcatccaaccgcctcgtccctctactcctcctcgaattcccactcacagtcactgaggtcgtggctcacctcagtgctgtcaccctccgtgtctgatttcccccccatgtcactcagacactcatcctcgctctcctccttaaatcggagctcccacttctcccactcatcccactcatcctcttcatcgtcctcgatcgttggaagagggatgggttttgaggtgtccccatcagtgaggggccatgcccattggagaaggccatccattttgtcggcatagtcctccgcgtcgaagttgagtgctggggtataggccactttgagccggccattgtcgaaatacccatgcaaaactcgaactcgagcatcggggagaaatgagatgaccattgtctacatagatgtcagtcagtcatacattgtctatcatttgatggagcgtctagactcaccgggaagtcaagttggggccgctcatgtcggtggtacttgccgatttggtgcttgtggttctggattccactaagcatccatcgaacaagtactatgagctctccaactgaggggaaagtgtcatgatagcattcttcgcttgtcatgacggcgagttgatgagcgccctttccatcagcatttacggctcccctttgaacggtgaagccgtacttgtcgttgctgttgaagagacttttgtcttcttccatgctatattcgtcaacggttagtctcaatctgctttctatctattcttggggatgtagacttacgggatcaggtcccagtaaatgggggtgttactgcccctctgagatttgcggaggtacttcgaaaatgccttatagagttgatagtgcatctcttgggggacgaagtcttgatttgtcttcatcgcccgaacccacgtgaaggggtcgtccacggggtcctcggggtcgagagcactattggcgattttgaaggtggtgtcggtgtcgggtgtgaagaattggatgagggaacgatcggtattccccgtccagaaatccatcgggtggatgtcaatgttggaaacctgatttgggatataatcaggctccatgtggaggagctctttgtggagctgccgaaggctcttcttcttctctttgaagagccaaacccagagtggaatacgacacatcgtgaaaccacctgggggtgaatgatgaagaaagaagaaaataaaaaggaagtgcagagaacgggggcccttttatgttctcccttggtcaaatcctggtctgcctccgacatccaagactatatcaactatgcctaaataagatacgggccaggttagacccatgggttcatcgcgtatctcaacatagaaagcttattcttcggtgctggactgcttcggacgccatattgggtagcggatagcttctgcttagatgtgtaccaattcaacaatatatagttataaatcggaacacagataccatggtataggaaaccctatattctccgaattcctttgcagtatctaaagttacatgaccattgatagatagttgatcagagaaagatcagaacaagatgaggctttagtgaagtaacgtgtatttcatagtaagaaggaagtgaaactaatttgaatgccaaatgccacgcaagtagttgtgtggtagaagcaaggaaggaaacagtttatctagaaattggaatatattgaagcgtgacggaaaatcatgcagcgcgtaacagaacccaaggttcctgttcaaggcctagatgggccatatcccattcttgacaaggcggaaaccatgtaggcataagcgcaggcggtttgctctaggattttgactggctaatcgcaatatatggccaaatgattgagcctataactcaccggctcttcattttagcggctgttgaatccagaacgcagactgcaatggcctttttctactaaaccattttgagcgtgatagttttagacacaccatgagtcggaggtccgggccgcaaccattttaagtaattttgactacgggcgtgtgcgctggctaaatgtttcgtagctgctcgtcttgaaatcattcatttcgacaactaatatacgccatgaatcctgccgaagacaaatccgcgcctcaaaatcccggctttgcccaactgggaatattcgtaaagctcccgcttgaacttcatttgacaatagggaaatatgtcttgggtgaaatacatccagcctctttcgctttcgctttggctgttctatgttgcagtcgatatgtctatcaaaagatagcagatcggcttttcagggactttaaacatgagtttcgagttgcgggtagtggattgagtttcaacttcactgtcaaacaaacgcgcagccattcaagccgttcacaggccatcttcacacttttccttgggggcgagggatagaatttgggcctctatcttgtaagctggcctcggtctgtatagcgtgtcgtgggaagcaacaagcgggtttctacgcgccttcggcattccatttaggccatgccgccattcatctaccctgagaccctggaaaataccgaggtctccacaatgtcttcgggtgtacctaagcgtccccgcgggctcagattcttcatggcattcagcacgggttctggcttgcctggtgtgaaaagctcagtatcggtcggacctggggcgacggcgttgatggtgatttccttggggccgaggtccttagcgagaacgtggaccatctgcttgacagggcccttagaggttaagtaaatgagatagggatggccaattgtggaagcgtgacagagagttgaggaaagaagaaagattcgggcgttggggcggaggtgagggagtgtcttctacaatcatcaaccttcagtttggaggacgtgggtgatatgggtaaacaagctgagatcggatggcacaatgaagttctcggtaacatacgctttttgaatgggccggtatcttcctaggctcgggcatctgcgcttctagtgcttcctagtctaaaatataaattgagacttgttagaatagcacaatagaccaatgttgtatattagtggctgtggctattcgtggatacgtattgtagttaacatatagcaagcactaacaatagaagagtggccaggttacgtctccacgatctaaagtgtgatcgaccataaagctacggagtagtgatagcatcaaaggggtcaggttcactaggaaacatctactcgaaccagattatcatcgccagtgatgcagaaagcgctccacatcctgcataactaactgcaacgatctgcgagacctctcctggttctggcagacagttctttgacgaagctggctgcgagataggtgcttggataatgtctgctgtcttccattcttgaggtatcgaatttggtgcattcgacagtgactttcgcgtccaagtcgcgatgatatgttgccactcgggcatgggaggcctccaaatgtctaaattgcggaaatcagggtctctaaagaccaacaaagcattattgacggaagcgaatttcagcacccattctagacaatcggaagtataaattcccggccccagctcattgtccaaggaactattgtgaatgaccggggtgaaaaaagccatcatcgcagctaaagctgcccgagtagacactcggtacaaaaatgagcctccgccgagtttacttaaatagtctttcctaatcttcgtggctaggcgatccttgttattatcccctttgactcgaattgcggaaatttcctgcggcagacgttggggtctgttggcaggaaacagctcctccaatctatgacaggcgtattggtatccaacctgaagtgggatgggatcaggccggactggcataacaacaacaggcggctgattgtatccaaagaaataccgatcgtacatcgatgctggaagtttgtcctcttcgaacagatgctccaagatccatcgtacaccgacatttgttgggatgagtcgcacctcatcttcgagggcaatcgctgggtcgttaattgcatcgaccagctcatcaaggcctgcgagccaaaaaatgctactcaatgggccgatcagttcatcaaatcctaaagtcagatcagcaaaatatcctctagctttcgccaaaatagatataggtctgcgtacgatagctattgctgtcaatgtactctccgatatcctcggggatcgttcccgggtatccatgctctcttgaccataccgggcggaatcctgcttccgccaactgacccattgtccgagcgagtttattccgattgtcggaggccatattctcttggataatgggagttgtaaaggggggtgttcctggcactatgctggctgatgaggaagttgagtatgtgagagatgggatggacgaaatcgaaggtatagaatcagtcggactgattgatgtggctgggctgcttgccgcagctggaaacggaaagctttcccttgggtccatgacttgatcaatgaattaaattagatcgcaaggagttgaattggattgcccgaattccattctaatattcctggatatatgcatagcttcgctcttaccaaaagcaatggcacctgccagtatatccgcatcttggtattgagtacaaatataagaagcgagggtcaggaaactacatgtgtagtgtttccctaccgaaaaaggagtcggatcttaacaccttaacatggtatcatggtccatggatcccccccggcttacgcctgacagaccgaagtctgacccatacctccggtgggtcagcactccctctatagacgatgtataccccgacgggttattttctagctgtagaagggagtcgatgacctcgaatctactgttcttgcttccagaagacaacttctgatgaaggcctacgaaattctaacaggaaaatagattccactggatggtacttaattctacaagaataatactgaagtctctaatactattcaggcaaaaggatagttaaacgaggatacggagaggtccttattagggtaggtcttcaagacggatcgacgtatacttcccttacaactagtttctatagtcctaaaggatacagaaagctctttggtataaataagctccttaaggagtaggatatcctacgagatacgtccgaagcgacttataaacggcgaaggaaaagtagtcggattcgtagatacttcctcgggagtgctatacctcgtcggtccctcggaggagaacgctagaaaattgtagtccttaattttttcgctagataatcgtagtctctgctttctactagaaaattgtggtctctgttttccgccagagttccctactggtcgggtggctggtaagacagtcacctagtaggtctagatccgataagtagatagatagtctcgtcccacgtcccttttctcccctcgctatctatcctatttctacttgaaatttacaattatcatactagctacctagctatttctagcggggagcagagaccacgattctctagtacaaatacctcgggtgcctaggtaacctatgggtacgcaggtgtatagcggccaacagtcggatgcctgattttgatggttttatggcctaattgggactagctctgataattttcagaccgcctttgacaccgcccaataccatcttttgtaagtacgcattgaagagacgaactaagctgtcagcattgggtaattcaaatgccttctaccccaccaataatgaagctatttcaattccgaaaaatgcattcaaacactggatagtaaaaagtattgagtaaattaaaagtgcccggtaattgtaaagggaaattgggataaacaatagaattcttcaataaatgcgacgccattcatacatctcggcggcccagataaacacactcctctcctacgtacgtcttccattcttcacctctaccactcctgcaagcttactctgaccactagcttacgtttctctcgaggtaaacccccatatgcctactactctatcgcagagtctgaccgatcctgtctagagtcgctatttgcacttctcgttgcgctatcctccgcgcttttctccgcgctgttcttcgcgctgttcttcgcgctgtcatctgccttatccgctgccatgcctcactctatggcagatacgctcgctctccttacccgggtcaaggatatcctattcggaatgctagaggttatcatcgctgcgaagagggtcctagaggaagtcaaggggatgcttctgatagctaaggatatcgccattatcaccggggagctattggccgctgcaggaggtctcttctactggggtcggtgggcccaatgggtacaggaggctgcgcgctcctggctccaatggacacaagctgttgagcattcctggctccaatgggaccaatgggctgagagtattcgatacaaatggatttatgaatgtcttcttatactctttattttccaatggagactagtaattaaagtaaagatccaattaatcaagactaaaaagattaaaagcggtaacccgattaggccggttgtcgtgatggtcctacccctgatttctctcgattttggagctacctaactgccctttatgcctccaaggattgatctcgagccttataaaggcgagatcattgatcttatctctcacaagactacccatgaagatattatcgctctccttcaagagaaatatcagattctcatcggtcttactactctcaaaagccgccttcgagaatggcaatgtccagtacgcactcagaaagccgatatccatgatcttattgaagagttactccctcgccataatacacaggatatactgaagattctagccagagagggcacaccatcctcagaacggactatccggagggttcgggctgatcttagtatcaaactccggctttctcccgaggagcgagagcaacaacgtgatgatatcgaagctattctcatttctgagagtatcattagcgatattgaagactttgggcgccgtactctacatcgtcatcttcgggcaatgggacaattttatactgagtactactccaacttttgggaagcctattcttactaaccattattatacaaataggaaacagatctctaccatttacagactcctccgtcccgacgtaattcaaggccggctccctggccaaaaacggcaaagacttaattatatgtcgccagggccaaatgatgtttggcatattaatgggcatctgaagcttgaaccattcggtattgagatttatgctgcaattgatggctactcgcgctttattgtctgggtctacatcggggtcagtgtcagtaccgcagtaagcgttaagcgccaaagtctcgatgcttttgcggcttatagcttccaaccaaggaggttccgctctgaccgagggacagaaactgttcttcttgctgatacgcaatatgagctccgaaagctaggtgatccatcagtacagatcaacgattgctatctctatggccggagtatggataaccagcggattgaggcatggtgggctattttatcaagggcaagcactggcgtttttcgggtaggcaatgatgatagtactatatgatactcgctgatatctatctaggattttttctggagcctcgcacacgataacctctttacgaaagactgcattcccgatcagatctccctccttgcgatctatatgccgataatccgacgccgagtacatcaatataccgtgcactggaaccatcatcctatccaagcccagcctcaacggccgcacgttatccctggaaagccaaatatgaacttctactactctgatgtaccggaccttcgctgtccaatcgataccgatccagactcaatgtcagaacaggcacagctattccgacatctacaacaagatgtggaagggtgggatccggatgaatatcttccaccgtctacacttgcctggtgtcagcagcagcttacagaaattggacagcaactagcggggatgccctttaaccccgaggatccgaatcctggcctcattggggatccacgggccccataccgagcggtgtatacagagctacgggcgcgagcgtttgcgcattggcatactggtcaagatccaatactcagcgtttatacgccaccgagaggtgcagctaattggcggccggataccgatgtctcgggagtcccagagagctagtcattactagaatatgggtagctttagtaaatgatattatttccctaatcttctccttttatcctttatccatccttcatccatccttcatccatcctttatccattctctattcatcctcgattttttgagaatggccgatcttgatcccaactttatagcgcggtttatgatcgcttggcggcaagtaaactcagctacacctccctcgagtgcacctccctcaggcgtacctccttcaggcgcatctccctcgagtgtacctccctcgaatgtgcctccctcaagcgcgccgccggcgtatgcaccaccagcatatacaccaccagcatatacacagctgttcacctcgggccagcttacaaatactccattctcggcgctccacaatacagtgagcagtaccaggcttggatacaatcggcgccagcatcaacaaggggtgataggccagcaagtggcggagcgggatatcccaattgcagtgaacttctatctccaacagtctccaggagagactgtaccaatccccaatggtaacatatctcttctttaataaccaagcaagccaaagctaatttatctgaaattatagcctcgatgctgattaccctccctccgactcagcgaatcggctttatcgacctttgggtcaggaatacgctattttctgcactgcccggaattatctgcttcagacctcggcttgaggataagttctaccttgctgaggcgatgattaagggcgcaggtaaaaagctggttcctcgatggatttcaggggtcgacgctgagttcgagggcacggtgaaggaattccttacaaaggttccagcaccaaaactacatgtggttgtcgcacggtatgaaggcgcaattgataattggccggactccaatattgtggtacgttcagctggtgaggccgaagaagtttcccaaacgcctctacccagctcgccgtctcatatatggataccacctcgttcattcggatcaccgcctcctgtcgcagttatcgaaagcccaacccgtccgagggcaaggggccgaaagcgagcccggccgcaggctgagggcccttcgccacgccggagccagaggatacggagagtttgaggttcatacggctggcaggaatgggaactttatgttgaaatccagacttggctttcgaaacgttttgggctttggtgtcagtggcgccagcagtttttctccggaaagtgcggagctcacttttcgaactttctgcccttggatgaaatcactcaacgtgttgttgtacgttccaatattattggaaccctctcaacacaagccgagtttcccctcatgtatttaaaggcctgcaaccatttggagaatatactggtgtttactatcggaataacctcttcagtgcgtaagatacacaaatgacgggattgtggcgggtgtgaatggcttcaaatgcgagagattcatatggttggagggggtatgaatagcttcatgtttcaactttcaagccgttctgaagaactttggtactctgctgactaggagatctgtcatggtaattcaggtattttaattttctgccagtctaaaactggtatgagctagtcctaattaggcaataaaaccatcaaaatcaggcatccgactgttggccgctatacaccttcgtactatgggtacatattcccgcctacattcacgtctcggcaaggtatattatattcaatgaaaaatattctagataactgctttgtgaatacagaaaatcaggaacccaaaacatatctatctatcgggcagaagatcccaaagccaacgccttctattcattcttttttgaggacgttttggggatcttccgcgtccgacgacgtagcatctccactcgttcctccatagtccagttgacttgatcaccaatggggatcagacatttagcgaggtagtcgtagttcttccggagtaggttcacagtgataaaaatataatcgacatttcggaagaccagagcgtcttccttcgcatagcggtccttctgcttgaggaaagcgacagggtgatctctccagtgacggcgcgggttcaagtggtgagaagtgtggtagccatcattgaaagagaatcggttactctgatatttgtcagtcttgattcgacgtgttcagcaggccaatggaaactcaccggaacatcaatcagtgtgatactggacaggtagtccgaattagggtcggctggatccacgaaagcatgctggccccagttgccgaccatcaagcccaagcgcataacggtgagcggaagaatgaacacgaacgtggtagcacgggcattgacgtagttgtaaagcatataaatggcaacgtagctgcccacctcccagaaggcgcatttgactgcatacttgaactgcccctttctccaaaagtacattgggagttccagccagatgaaaaatatgaaccggccgacataggtcaggaagtccgggatgctgtcgcggttgtagtacatggttgagctcaggtcgtctccgccgttaccctcaacgtgatggtgtttgatatggtggtagtagtaagagttccacgtatgtccgtgcatggggtccagcaggtacgggaaaagcgtgtcgaacagatataattttggggtcaggactccattcatgtggatgtgctggtgcttcatcagcgtgaaagcaccgcaataaaaccccataatgagccagtgcaaggcgccgtggaggtacgagaatcggtaatataggaatgcagcacttggcacaatagtggtgaagtaaagtataaggtgcgttaccatgaccacgtcggtctcgtatcgcacgatccctttcgcccagttgatgtatggcgtgagcacatacttctgaaaggaagcgggtagcttggccctcagcagcggggtatcccagaattgggagacggtgggatcaaattctacatgagagggatcattgagattttgaagcttttggactgtttcttcggtgctcagcttgtccaatggcggtgcatctttttggcctggacctttgttagtttgttatttgaccgacaatacaggggtattaccatctgagctgggttgaggctcaacaatagcagcaatcaccagtcgatcttggtaggtgagctggggatctgtgtatgtagagggatccatgatgccttagtacggcaaagcctagtctttatgttaatcctgttaaatataactcaacggaagggcactaacccgtgtccaagcagctgattgaaacaagcttctagaataatttccgggatccccgggtttataaagacaatcgaggcctagcaatacgctgtcctcctaataaagacaacgcgtcaggggcgcgaagagatttcgggagtcgactgtgggtcctggaatcgacaagctatgcgaagtgtccaaacaacagtttgaatgtttctaacacttgatctagtattttcaaatacagctcaagctttccatcgccatccgagagtagttggagatctcgctgtcgatcaatcatgattttgtgctgctccgtcacattccatccgattcagggggctcatggtcggaaacgttttcccctgaacatcccaccgacttaattagtggcgaaaagcacaacgaatgtacgattcttgatttaatatacgttgtatgcatgtggaatagtagcttggatttacaggaagtattcctaagttctagtctagtgaatgagatcattacggcaatttacttttctggggtagccccaaggaagatcaccactaaaagagcagttagctcgcctaggcatgacaagttggaggactaaaaacagaggtgactttcttctcatttacttttctatgctagaggacttcaaggaccctggtatacaatgccttgtctaggccgaggccaatgcactgtagaggttgacccgagaacctgaccggctctattcagagcactgacaaagaaataccggccagtccggttggtaggaacagatatctcagtctcaaagccgtctttaggaaatttccccaagaaagtggatgctcccccaccaccctcaatatcggttccatccaaagaccacgtagccacttccgtggctccattccaactcacatacactcgtccatcatccacggcaatctcaggcacggtctgaggatgaccgatccaggggctcttcgagatccgataagtacggatttctccgctgttaaagaatgtttcggggcctatatggacattgcagagcaaagatccgttcgaggcatattcagcccagtttgcgttgggtccaaagcctaggatgacattgccgctatccaagatctgcattgacccactgttctcggtgaggacactgttcgggctgatgtattcatgctgcaactgcacagtcatcttctctgtgtccaggaccaccgtcaaaccccgggttgaacctgtcacgggacggccagggcagttcccgttgtcgaaaattgaaacaatccgaccattttcgtggaaccgggcatggtgctgaccgttgaagtctgtcgctgcgccaccggataggtctttgaacatatttgctttccctcctagcttccagatcacggcgcctgtttgaccatctacatagacaacggagctcatcattcgacaggaaatgaggtaattgccgagatcgtctttctcgatgctgttgacatggaacagatccggcgcggtcttttcggttttgccatcgcccggctggaaatgatagtactcttcaaatctataatggtccgaagctcgccactcaaatagaacttctcctgtctggacttcgatctcctggaaccctgcatcgaaaatgaattcaacttccggtggtgcctcgaatgccgtttggttcaccggaaagacaccattgataactagaagtgccgtccctgaaggagtcagggttaactcgtgcgcatcaagctgccacccattgcctgaacggatctgataagcttcctcatagcgggagtttatctaaaggacattagaatattccctgatgtaatgccgccaatcggcaacttaccaacgcataataggttgagtcttcagaaagcgagacaacatagtcctctccttggaaggactgtatgtctgcggtgacatacccagtcgtgtgccaaacgagatacccttttgtatcaaggagcatcactcctgggatgttcacctgctttccccagtagggcacgacggtgtaaatgctctcattgtaacacagggaacttttgtcgtgaatgttcaggataggtccaatagcattggatgagtggtacagctggtgaggccatcggtcaaacgcgccaaggtcatatggtcgcgatcgatacagcgggggaatatcagccaatgactcgcatatcaccaagagcaacgccacgggttttaaaaacatgattggacatctcataatatcgtgggttaaatcgagacatggcagccgtatgggatatggcttttagccgatgtcgggggacgatcccaacctccgctgcagcgccaagcagatgtgcgcgggtgaaaccttagggaagtcttggtgcttttgttttggtggagcacctgcacatcggattgcttgtgagacttggaccttccgacctgcttgtaattgtcttaccgtggcttgtggtatgctagattgccttcttgtactccgtagaggctataaaatacatattagcaaggcacacgctcctcggcgtttcgaaagataccccatgatcgacatgatatgagttggttcgtgatgagagctgtttatttatagtcaggggttgcatctgaactcggagactcggcatattgcctcaggcttgcaataaataagcataacattggcaagtggaacgagttcattaatctgtaaacggtgatattacttcgagtcactataatattaggatttacagaagcaactttgaaatacaagatgcggcgaagttgtacttttacacaaagaacatgcggctcggataatatatccatcaatttgaagctatcggaagctgacggtaaatcccacctcttctctcagggcatgatcttctatggtcatatgatatgttggaaaaggcgttcctttgcttagaaaattttcagcgaatcgacgtccagaaagacgaagtaggtctcagccatcaagaggcgatgttgcaactgacatccaaagacaatatcctgagaatatcttgattatatcctgattattctcatagatgcccaaagccgaagaaaaatgtctcacttcccctctgccaattctctagctcctcgtagttcctcgcgaccccaggccactaaggctggatgcagtaagattttcgccaccttggcacatcaatggtacagacccaattttagtagttctttgacatcatgacctccagcgacaattgcaatatctgttggtgttgaggttaatggtgttgttagtgaatgtttctttctccgggacattcggaatgtaaacctccgacagggggatgtatacagacatggagatcgctcttaatttagaagaacaagtaatcaggatatcttctgcaaagacacgctatgatgcgtatctccacagttcgaaaaccatcaaaaaacaatccgtgcacataaagatcgctactttccctcctgaacgtcattttttcacatccaactcagaataaataccagccacctaccccctaccttcaactcccaacctcttaaaccaccctcttaaaccacatctttctcccataaccataaatcatcacatcaaagcctaagatgaagttcctcacatgccttcttatgctggctacctctgccatcgcagctcctatcaccaacaccaccaaggtgtcgaagcagttccaccttaagtccagcggtgccaccaacgcgaatcacaacaacctatatgtctactcctaccacacgggcgccggtctcagcgacgccgtgctcaccagtgatgttagcatagccagtcctatctacctgaatgggacgaacgcggtcgttgatctgaagactgaattttcctggggactaatcgccaccggcgacaccaactatgcctgtgagtatcgccacatactttggaaatttcttcgtgtcacatttcagcctggactaagctaatattttctttcacttagcttgggaacctatcgttatcaacgctggcagtggcggcagcgcaggctactccatcaagggcgatgccttccaatggtcggaaaacaacggcttcggtggctggcttggtaagaaatccctgcgcctttattcgttggcctctttaagaccatggtattaacatctctgtaatagtctgcgattggtaccacaatgcgccccagttgttctacttgaaccgttactatactgccaccattccctccagctgctccaaggtccagttgacgactgagtatatctagataccccacggtcgcttggggtgatttgggccccttttaggcacttaatgatcgacggttaggagtccggtactcctgatttttactagttaatagcgatttcagcgaataatgaatatgagatgcttgtcttttcgctatgtacattctgctagttcaaaccgggatatcaaaaataaaaaataaactagcagctgatcaactgcgtaacatcatgttttaacgtaaagcgtttcccgtttctttcctcgctgtgcccggtcatgaagctgcaattcctgcgatggggacacacgagttctcgtagtaccgcttgtccattccagcctgcaagcgcgcttcttcgttaaatggtccccggatcggtcccttgaaatgcttctgcacattcgaccggaagacctgaacaggatcagtcccctcctgggcacatatccacgtcaaccaccgatgaccagtggtaacatgtgtgatttcatcgttgtggataacctccagggtcgccacgctctcgccgtcgccagctttgcggaacttctcaatcgtcatggggttgacatccagacctcgtgcttcgtgcaccagggcgataatactgattctcgctcggagatcgtatgcggtttcagttgccgatagccacaaactgtggtgtaccgggagcgaaccgaaactagatcccatttcttcgagcctagtgcggagcagagagaagtgcttggcctcgtcgctcgcgaccttcagccagtcgtagaaaaatgcccgcgggagttcctgggacgtcccttttgtttggaatgtcgcaaagcggatgcagatatcaatagccagatcgatagcccacagttcgatattagccagcgcatggagcatagcaatacggctcttcaaggtcccgcctcgtcccgccttcggcatgtggcccggatcaaccgtttgcattttctcgcgcggtggctggtcaggcggggcgacagtgccccttccaagcggcatgggtgaatcagaaacctccctagtcgtgaaaatagagaaaagatgcgtagccagctcgatcttgtgctctggattggcggtgttgagaacgtgggcagcccagtcacacagcgtcgcgttgtcgccgagataagtcgccataccgagatcatctggactcgcaggaagagaaacagtagtagtagtaatagcagctgccttctccgcaggctgcgggtgcttgagctgcactttctcactcacaggatcgacactagcaagtccgacgctgaccccatcctcagcggggaaatccagcgcgacgaactcgccgcgcacatccaccgggaacgtgcaggccttgataccaacgctcgattcaccggtctctacattgaaatcgtatgcgtgccacgggcacgacacgacatatgccgagtcctcaatgtcaaccgaggaatcggccattgggccgccagcatgtgggcattctgcctccatggcgtaatacgaccagccgtcattggtctcgttggatttcaggcttgatttgtcgatcgtcgggagccggaataagacaagtttcttgcctgtggtcaggcgaaccacgtaccgcgcctgtgtgaagtcggatagtttcccgcagttgatccacattttgattttggcaagcgtcgcttgtagcctgtttgcgtgattggatgggtttgtgaggcttttcgcttcgattgacttaaattatcacgtgacgatgtctatggtcccacctcctcggcgcgcatcaatatatcttgttgtaggccaattataggggcacctagctaggtacgctatataactagattatgttacagtgtacccgtctaattctaaagatcatccatcatcaatcttgtgtaaataataatgtaaagtacgtaaaatatgtaattaatatgtcatggatacggtaaattggcatggtaattactagtattcctggtacatataacgtactgtaaaaaaaggctgtacatatttaattagcaatagttataactagccagggtataaagtactaaacacctgcatcaattccaactaaaataaaaaagatgttgataaaaactaaccatagtaaaaatctagtttgtgaaaactctgcataggtgtcgaatatgtacggttgggttctcgacaacgtcataatatttatgcaactaatgattgagccattattcgtcttcttgtcggtttgcctgattcccctttctttccagtccaaaaatctgacttattgataaaccaatcataacatacagctggggcaagattactgaatactaaaaagattgctagaaaatagttaaatagcggtgaaaacatccttgttagatacgtaggctcgggatccagtcttactatgcacgagaaagtaccagctatcaccatgactgttggcgtttacagcaattccttcagaggtcaatgactctccacaaatacatagcccatcacaatgtgatggagcggcagattgcagcggattttagacgcctggttcccaaaaaatgtgggcctcgcttgtctcaattaatagtccgtaactttcctgctgtcgcagatttttccctttagcaggactatttccttataatatttaggctattgaaagccgtcttgcacttatataaatttggagcgacttgacttaggtagagtgtgaagttgaaaaatacgtggtttctgactggtattcatcacgtctgtgacgacttcccaaccaacaccaacacttgagcacattctgcgacaggggggttgaataggtctaggacaaataatacctagtgctcactcttttatttctcttgtctttctttgacttctcatctttccactttcaactcacgtttcaatccccagagcagtgacgatttttactccttaggtgagacactcgctaactaactctaaatgttttacgatagactgacattgtccacagaacactatctgaagatgaatactggtcccaaccatccgatcaaatggggaacgtgtcgagaaggcgtcctgtcccagctgcaacgatttgagtccctgccccaggatggcctcaagttaatggagtcttatcaggctgtccttgataacgatgagactttcacccaatatttctcagacaagccacttgaaagttacactatcgaaacacgtctaagggaaacattggggattcgtcctcctaggcagaataatccctcaatcagctgggtcaacattttccgacatggcagtttcgaaaagcaaagtgatggctcctactactgttatgatgaaggaaagctcgtggaaattgacaagtcccttcacaaatgcatcctactcaaccgatgcttcctcccgaccaactcgtacctgtggccaagtcctgccgacgctgaacgagaagctgaagtcactttggcaatcgaggcagatatcctggacgaaatcgacaaaaagatcaagtgtgcgtacttcccagactttttgacaaagctggtaagagacagactaatgaaaacagacgtggagaaattgaagcgacttcagctggctctgaagaaacgccgaaataagctccagggcattcgagtccccgtgaaaaggtctcgtacgccgcaaacccctgtacagtaccctacaccaaacgagtcacgtcgtcccacggtctccgttgagacacgcgatgcccgtgcacgcagttcatccgagagctcgggtatctcaagtggatccgacatccctttcgccgtctccggtgataactcaaggccactatcgtatgacagagatgatgcggctggcagctcaggccaagagcattcgaatctcatcgatcttgccgaaggcaaccagaacccacacgataataagatgggagtgtcggtggctagacgtcgcagcaacagaaatcctgaggtcgcaccaatccagcatgacaaacagaagtctaagcaatcccaaggagatgagtcgcctaaacaccagctcgatgacacacagaagtctaagcaatcccaaggagatgaatcgcctaaacaccagctcgatgacaacgaggacctggtgcaaccacctccaaaaaagcaaaagttcgagactgagccgctcccaacagatatcgtccaaacagatatcattccaacagacatcgtcccaacagacattgtgccaacagatatcgagactatcgaccttagtgaagaattgccaatgtggaaaggaaaggtcgatacgcccactaaaccgcagcccaaatcttccaccgggaagcgcataggacagaagcgaacacggaataacttcaccgactacgagaagaagcacgccccagcctggttcaagagccagatagacgcaggaaggctcccggccgatgttgagaaggcctatgccgaaaagtttggtgtcttccaccgcttcctcacagtgaagctttgggtcgaccgaatggaggaaagggccagtagagcacagcccccgagcaaaatcgtggtattgaaagtacaactcccgttgcagcttcatatggccttcttgaatgacaattcctcctagccgatccggaagttcccaacgagccgggcaatgtcaccggcagctgtctccagtactagttttccccccgcgccgccctatgtatctccatatcccttattccgccctaatgggctgccgggctcatccgtcgcgtaccagctggactggccctccaaactggctggattaccctcaactaagagtggccttccgaatgtgtactgataatgacctggatgtcggttattgcaggtcctctttcatgatatgactttcatttccaaggcccaagaagctcgctcacggtatgttccatcatttgagtatgttccatcatttgacagcatcgtgaacatcttactaatctaccttcctacagaattctcgttgagcgtgaaatttattttccgtttgtggtgtggattcttcgtgcagctggtttacacttattttcatatcgcctacttcatatgctacttaccttgtaataataccatttttactatttgaggccacccacctagttcccgcagtatcaaacggttccaatgggtagacgcatgatgtccatatgtagagtctcacctacatggctcccttcttcgacggccactgtcactcttgatgtaactccttcgacgtaccctatgattcactttctcaaataagtagcgcgtagctcttcattcaatttacacttcaacgatccacttcttcatctcgtcaattcagccccacaacccgttccttgatgcagcctcccttctataccgtctgacatcattaatgcaaacgcgactttcactaatcccgcgaaggcaaaagcaaacacttaaacttaccgccagcggaaaatcattcacatctcagaacagcctcaccaacgcctcgagcttggctaacacaatcatccggcttcggcctctgccagcgacccccgtaactagattcacaattttcaaaaaactggggcaaatacagtctttatggtttctcgatgtggggtctcaaatgtaagactcagtattctaggaacttacatggcttctactcaatctcaaccgccatgcatttcgatgcctttttagggctcgctctacaggccgctctcgttaatagaccgccagcattatttagtttgagtccatataaggaaaaggcacgccgaagtagtcaccttatataggattgtatcataataggtgtgaatcaaaggtgaaaggctcactcttgctttaacatgtgtattcgtttgactagtaaaccgcgtagaccgcgcgtttctacgactattcctcttgactcaattgttcctttctacttttcccaaactgtttgcctctttcgtcattcctgacatcgttccggtgatttggattaactgcatttattcacgtcccgaagctgtgaacgaactatggatcatcaccaccctcctacccaggtctcggaccaggtagcggcgcctagcttcttgtcgggtgaaaccgacagcatgctcagttcatatgtcgcactgcagagcgaccttgacgaggcttacaggaagtacctcggatatgccgacatcattggtagaggcgacctgatggcaccgctcttgggcgactcgattttctaccccgaagtagaaagaacagccgctagaatattcggcgagccacgcccacgcttggttcaaggcaacgtccaagcacccattgaatggaccgatgtccttcgtgaatcgctaactcctggggatttccaacgacaagaaaacggcatgttcctgtgccgcgttcggggaagtttgattgaggtttctgaggcgagttaccttgagatcctcaccggcgtcacagaacgactcttgcagccattgcaaaacttgtccgacgagcagaaggagactcgagcacgcctcaaactgggtgcctacctgcatcagacacacgagtcactcgtccaatgtaagcccgcccacttctatgacttgttcggttttcaaactaatgtgacattcaatagttgccagcgcagtgcgcgagtctatcattgctttgggtgtaaacccggctattcatgatatgcagctcagctccattggatttgctagagctcgactgcccaccccaatgtcggccccacccgtgactcctactcagtgggtgccctacatgtccatgtcccacacagaaggcgatatccatgagagcactatcaaagaggaagaaacagaattcgttcggtttgagacccctggtatccttggtagctatctggcggaaagcagacatcctgacagcagaggaagggttcaatctgcgcggtctgacgtttttcgaggtaatttcattgattctatgagcgagcgcaatggttataccccgtcatctgtcgacgatctgagttccattgatccagccagcagctcggattattatgcttcgtcaattggcatcactcgaagcaactccactgattcagcgagccacaggatcgcgatggatgcatatcacagtatggtagcggcctctgcttacctgaaccacaacaactatttcaatcccgaattgattgatagcaacgtcctctccgtcaacaaccatgcggtcgaaaacacggatgccaatgtcaattccgatgtcaatgcccgtactgaaccgtctaaactcacctcagagatgaacgttaattcaatcactccatggttgcgcgacattgatacttccagtgatgtaggcggcgatgctgaatcatttggatccaacatcccttggctggctcaatccgaggacgcatcccgtccggctgataccgctgcagaacaatatggaacgagataccgaggcgtaaagagaccccgaactgaatgttcttccagcgaatctgaaagtaagccaggggccggtacaagatactctccaagggaagaggccgacgggcctgcatttgtgaagtgtctggtcgacaaaggatctacttccgacgaaattgaagaacaatacttcaagattttcggggtttcccggtctgcgaagtgtctttgcaagaaattcgagatgaggggtacttgggggttgctgaaatctcaccgagaagctaagatgcagaggactatggtacgcagccgattactcccgtcttatatggaactttactgacgactcttctagtcatcttagtcctgctgtgatcgatacaggtgattttcctatggggtcggagcccagttggctaatgggaatacatatgagatggaatggctttggaaggaaacgggatagcaagggtgttagtttagaggatggtgaagacctggaggcatcatagccggtcatgaccactctcttaatgacaatttcctgatattacaagtccataagtccatacttaacttatcactagagtaaataatggtatgctcggtgtcagtatatggtatactccctagaggtgtacatagttagaatcccctacaggcgtacatagctagagtcaatctgtagtgtttttttcccattgtactcacagcaattagattggcctcgtgatcgaaatagagactgaggtgttccctatcctccctccatcttctttcttctcatcacctttctgttcatcggaccaacaacgcgtctcaacttttaaaccaaagccttttaccaacattactctcttttctgtccttcgcctgaacagttgccaccgtcatgggtaaaaagaagggtgtccatgttggcgtccgtgtcggccaaattgaagcattgcactcaactcaacctggaaccaagcactcaatagaatccaaggttttttccgaagaaaggaagtcttcggccttcggttttgattctgagcttgaaaaggctctcaataagtttttcggtggtcctccttttttcttgattctacctgataccattgagggccactccaaaccttcgacaggcaagagagcgtgcaaaggccgccggcacccaattgtcgtagttacttgggtggatgtactttctgaagcaacaaccgcaagtcaatttcagcgccagaaaaatggcatgtatcggtgtcatgttaaaggaaggttgatcgaggtgtctgcggagaattaccacttcatcgcattgggttacccccaacgtatgatgaatttttcatatctgtccgaggcacagagagtacaagaggctgctggagctgtgagagaacaagacgccaaccctttcaatgatggcgtggatcgtgagtttgctgtcttccctggtcagttatctggatactaatatggaacaacatgcacagagccgctcaactccgcacccgacccaatggacatgacccgaagctcaattgcagatcttttgcgtcaaactgagaagagtgccatggtctcataccaaagtgagagagatgtcacaggaacctgccatggtctcataccaaagtgagagagatgtcacaggaacctgccatgtggccgaagaattccaggctgaaacaacacggcttcgccccaaccacaggcaggttagtctccagtctcatcgcaagcagggtttctctagtcggactcccattttgatggcaaacaacccagtcagatcagaagataacctgatcagatctgacgttccaacccacattgatgatcgcggggcaggaagcttggatatcctgaaacagtctcaatccgaaacaagtggtcccggaaacaagaacaaactcctagttactacccatcacgagagctcttttccttcttggaccccctctccgaagaaagaatggcgcgtgcgagagggtccagttgcatccaatacctcccctcgtgcagcgccgactattcggtattcctcacgcgaactaatcgagggaccagccttcatcaagtcgctcattgagggcagcacatcgtggaaagaacaggaggagctgtaccaagccgagtttggtgtttttcgctcccagtttagacttgtcaaaaggttcggcctggtcgacatgaaaaacggcggctttggcaagggggcgttcaagaagtcgtcgagacaactcaagtctcaggtatgatatcttccaatcactcttaatccgttctctctcttacttgatcaaccgattaacatctcttaacagtcgacctacaccaacgtggagcgccgggaatccagcccgattgaggcttcccaggccatccgccgggcgcgggagaagaaaagggacaaggggaagaaaagggaccccggcccttccgaccctgcgtaggtcagtgattcgaggtcgggccgggggcctaaattgctagttcgaacccaaatctcgacaaacgaattgagaccccgctagcaggggacagaaggaatatgagttttgggggtgatgatactccctgaacatgtgtaagattcagaaacagaagcacaatgaaagcgtacgcaaaagtgatgatgcagtcgtaaattaagttgttaagtacataaggtataataatctcggagtcggaactcaacgtttcgttaataatagagaactaggttcattccacagtggacgtatacaacaaataggaaaaagaacctcatatccaccgtatatgcttcaaaaatgtgttcttacaaggcgagagcaagacccagcacaccaacggctccagcaagactcatggccacaccagtgggggcggcaccaccatcggcagtggtggatgaagcagagccggaggccgaagcagaagccgcagccgaggacgaagcagcgtccgagccagtggcagcggaagaggaagatgagaccgtggtagtagaagtagaatcggtagaggacgaagcggcagcggcagatgatgaagcggcagaggacgaagcggcagatctagaagcgccggagctagcagcaccagagctagaagcaccagagctggaagcgccggtggaggtggcctcagcagtgctagggccagagctgcttgcgcccgagctggtaatttcagcggagacggatgatgcgaaggaaggatagtagccctcaaccgcggtagtaacgtacgccttgacgctgtcggggaggctgctgtaccaggtcggccaggagttggagacgatgccttgctcgacttgcgaaaggaaagcagcggtattggtggcttcggcccagaatgagcttgggacagcagttgctagaaccacggcaatggaggggggaattatatccgcgaggccagcgtctccggattcaatagcggagttggtgtcggccggggcggccatggccatgctggcgaggaggagggctgcgagagacttgggctgcatggtgacggttggaggaagtatatactcggggtagaaggaggagataaaatggttgtgaagacgagctatctctggtgtaattgaccaagtggaagaaaaaataatcagcatctgggggctttatacctaatacgcctgatgcggaccctggaaggcaatgcgaggctgcggcatagcccgaatgagaccatcgcgctatgttcccgcgttccactagcaacggccaatcgcagcctcgtcgcccccaaaagttgtcgatcaaattgaaaggttgcacctgagatgttacgagaaatcttatatagcgcaagcattcgcctaacatctccaacgttgggggctactgtaggcgccctgctgcgaaattacccgatgtacgatgtagggctagaggctaactaacgtctctttttttctgatttcggaactcatcctctgtacgagtcctggtattcctcagaggatactacagtgaattgaaggtccggtgttctatccgttcgccaagtcccaagaccgcattacgcacgcctttttgtacggagcacaaggctctccatcattggattcggaggctcttgaacgtgtttatatgacgtcatttcttgggggcccttggaaataattcttgctgcctttgtctgtacggcgtttgactggtgcttgggtggtaatatccccacctgtcttgtgtatggggttagcggtgcaattcaagggttcaatcagacgacatgttatcgaatagaagtttttattgtacgtaaacacaacacagttatatgcaccgcccattcaaacatctcctcgatggcaagtcattggcacaaggcatccaatagggtctacatcatacacagccgtgccccacctgggcacaaggctgtgttgggtaaaagaccataaataaccacctccatgtagtgagactctagtgaaatcgaatcagtctacagcattgctgcgacatattaagttgggcctgtttgagcactcgccactagtgcttgggacgttcatatagccactacattctcggcattcgtcatggtcatgaaccactcgggatcagtagctagtatcttctatctatgttttaatatctcggttaatttatatcgctgattgatcacacctatgtatgtctgcatatatgtgtagggggcactatatatatatctggtgctaacggtaatggctattgttgtgccacttcgggcgtgagccatcgaactctacatatatatatatctctcgcagcgatatatcaagcgtgaattcttttctttaaagaaatataaaggcaatggattccgcaccaaaaagtattgccatttaccgtcagaccaaggctattatggctccacttgatgtgttgatgtctacaacgtggttttgctggcaactttctctattgatatactacagcaatttcaacaatccgagacactccaaacgaaatcgttcaaatgaaacatcgcaatctcattttgcatccagttcgaaggaataggatagatagaaaggacaaaaaaaagaacaaaatcgcgcacttctgcctgaagaaacgttggggctttttgtttttcttgctgaaaatatggccatcataagtcagcctaaatgcgtcagttctatgcgtaatagaagctcccatccattgttcaatgtaagcttaatgaaacaagtctaaaccgaaaaaaaaaaaaagaaatctctccctcggggaatcgaaccccggtctcccgcgcttatcggttttaatgacaagcggaaatcatcaccactagaccaaggaagaatgcgatgaccgagttactgctcggccacttggctggttgatgcaaaagtgatgaagcgaatgacatatgtaccacacattcgcaaatgatactcgttaatccatgctctcttccaatcgtacgcagtctattggctggtctaacttgcaagattgcaagcaagatcccaggctatctgaccaggctatttctattctccgtgttagagatagtccgccctaatctcaatccccaccttgaatgttctcaaacggaaagtcctggagaagtccgggtctttcagccgacttccccgcaggaagaaataaaaccgttaggacgcgcatttttctttgcggtttaaaaatcacaaacaactgtcaattatgacatccgttttcaagaatgggcgcatcttcgtgccgtcgcaagctccggataatgaggggaactttgccgagtgcatgatcatcgagaatgacaagatctcgcacgtcggctctctcgatggaataaccatcccagaaaatgcaaatgtcattgacctggaagatcggactgtcattccaggttttatcgacgctcatgtacacatcctgcattacgggcagtcattgcgcaaagccgatctcatcgcatgcacctccctcgatgaaatccgcgaagccatcaagtcctacgccgaagccaatccatctctgccgcgcatattatgccgaggctggatccaggcatctaccaatggagtcgcattagcaagtatgctggagggtatcgacccgcgtcccatctttattgactccttcgacatccactccatgtggtgcaatgcagctgctctcgatgagatgggggctcacacggcccccgatctccctggtggaacaatccaccgtgatgaaaatggacgagcaactggcttacttgacgaatccgctattatgaaccttgcatggccttatctagaaagtcttagctccacggaagacaaactgagtgcgttggacactgcagttgctgcgtacaccgctgccgggtataccggactagtggatatggccatggacgaaggaacatgggagattctgaatctctaccgtcgcaatcataccatcccattccacatcggcgcccactggctcgtccctttctcagcggatcaagacgccaacttcaaatacgtggatcgagcgattgagctacaccaccagtacaacgagcccgatttccatgtcctcggaataaaaatcatctgcgatggcgttgtcgacggatgcactgccgctctcctccaaccgtacaccggtaaaacagatcgcgtcgagccaatctggcctgagaatatgctacaagaaatagtccagcgcgccgactcagcaggcatccaatgcgcaattcatgcgataggcgacaggactgtgaaccaagcaatcaacgtgctgtcgagagtcggcacgccaggccgaagacacagaatcgaacacctggagatgacaacctccgaagacgccaagcgactgggtcagctgggtatcacagcctcaattcaacctgtacactcggatcctacgcttttcaaggcgtggcctggtcttgtggggcccgaccgctgtaagcgcgcattcgcctacaaggacttcctcgatgggggtgctcccattgctatcggcacggatgcccccactgcggctcattttcctttccctaatctttacaatgctaccactaggcgctcggcgattcagaccgagactgatgatactgtaaacgaacatttcaagttggggttgtctgaggcggctactgctgctacgactggtgcggcttatgcgcgacatgcagattcctggactggaagcctgcggaagggattatatgcggatttcttggttgttgatatgcagtggacgccggagtcattgcttcaggcgcgtgtctgccagacttggtaccgggggaagaaggttttcgactcatgaagtgattgatagcggtagcctatagacttgaaattagatagaagaatacacggatgtacattctctattccttatgacgtcgggtcttgtgatgcggggtggacatcacggtgacatcaccgctattgcctcacaacagccatcaaaatgtagatgtacaacatacagtacagcacgcaagtaagatatagaatatcaattgacaatttcttaatttggagtcatcgcttcatgaagacatcactactagttccgaactaagtcttccctttgaaacttcagtgtagtcccgagtacaacgaagtatacgaacgccaattactggtcgagttgttcggggtgctcttgcagcccacggtcggtacttatatcagagaggaatgaatctgatgtttgtcagtacaaaagctttgatctcaagagtcgtagtcgggggtaacaaagacatactgtgatctacgtcctgcgaagaagaccgacgtggatattctggggcatgctgatgcgcaggctgtggggaaactgaagttctgtttatttgaatcagtcagtaatgggatacttcggggtagacttcaaaaattgtgatataaacgcacggggcgacatcactgtccagcatgagatcctcactcctgatattggattggtcttgctgttggtgctccatgtttccgatagagctacggcgcttttcgtaattaggatctagggggttgtgatcaatatccgtcttgaccatgttcgaatttagagtagactatgtggtggcaaatggtggattggaggtatgtgaaagtgttagattggggaaaataaactatttatcttatactacgtacgggaagcctccgatgtcataagttgggcgtggcaaacttatgatataaacaatccatgcggacgcggacctatcagagtcatcgtgatcctggtatttgaacaacgaatgtcgcccatattgaatattggcggcgaggccatgaaaaagagttgagctcttgtgatactcacttgaagtcgactgactcgttttgcactgcgaattaatttatcatggccgaaattgtatgaggtcaagtgctcgtcaatgtacgacacgatggcaaaattagtaatattctgggccattcgattgtagtttaggattgcgaaatgaaaggacaagtggaggagaggtatgagaaatatagatgtagtactaatactcgctggttcatcgtctatacattttgatctgtcgtctactcttggtatatgacctttctgcttgctagcttagcatcgagttcgaaccaccgggggcaaattgcaaggcgtcaaaatctcgccggggagaagtaatattcagtttccaagtatgagacaagtcagcgccatgtcaacaatttgtggcggccctcctcgcaacatacatacagtcacaacagtgagatgttaggcttctggtgagtgctgcttgtgatttcggacacattgccatgaccttttggtctcacgaaaagacattcctcttgggataatatacctcgaattgttttgagagttgagaatctcattctgggttctttcctccagaaagtttcccaccatgtcattcattcatcctaaattcattccgcagccaaggtgacaggccatttgtcatggcacgtatattccgcggtgtatttcaaagatggcggatattatatgacaacagaagggattctgttgctgacattctggtgtcaccaatgggtcattggcacgaccatatgagtagcaatgtcgtgctgctaccaaccgaaatcattgtagtttgagccgaatgaagattttccctcgtagtccagtattattcccgactctaggaggtctggctcacgttggtttgtccctttgttgaatgtagatatttgccagggaagcagttgcctaaacaggaaaacacactagtaccaaaccggaaatggaatgcgatcacaggaatagagaactccgatccgaatttgcttctgcgcccctggtacggagttcatgatcaaatatctcgaggttctagaaaccgagatgcggctcaagcgaccgttaagtgctattaataggtttatgattacggaaggatagccaaacgtatatattgtaggaaaagtacgctatgaaatgactgacggccgtgacaatgacgaacaaactcaacgagacaatactacaccagtcactgaaagagtcactattttcctaaaaacctcttgattgatgattgaagtacggagtaaaaaggccattcttggcttcaaccccactacatcttggcttcttcatacagctaagagatccgatattgaagctgctagatcgcgaaccgcggaatgcacaaggtcccctctggacccgctggacggaaatcgtctagctcgaggtgtatcgtgcagggtaagccgagcatgattcgcctcgggacagggccgacaaagccaatgtggggtgcagaagcagatcatttagctaattcttcatctaaccttggaagcacatcagaagaagacccggtcaaagcaacgtcatgaaccaaccacgttgtgtgaagttgaaatcgaccccggggcatgttgtcactagtcctaatggggctattgtctggagaagtgggtggagagaggatgtcactgttcggatcctcagttgacaggcgcacacaaattttttcacaggtttaaagagagcgggatttgtcggttttctgaaggtttatgcttgaagtaattgcattgctgtttgcgactacgatctatataaaaatctttgaggtgaaatattacatcataccttcaaatttggttttggttcactctggatccggaagagaaacaccaaggctgcaccaatctataccagccttgaaaagtgtcaactgagtcgcggtgggatcggaatggtgttcacacgtggcgatatatccggccacgatgatcagacaataggtaaacccagaataccaccaaccgagatctagaatattaactaacagcgacatagatcatcaagatcctagcaaagatgtcataattgtgtcctgggatgggccgcgagatccaggaaacccatacaactggtctctgtgcgagaaatggcttctcacagccctcgccgtgttcgccaccttcatgaccatgatcaacggcacaatcatcacagtagcccacgatcctatgaatgagcgcttcaacatttcagatgcccatttcccacattcatactggcccgtcacatcgtgggccgttggcggtggctgtttctccctgctggtcctgccgctcatggaggatttcggtgtgcgatgggtgttcctgggcacgtacgtgaccttcatctgttttgtcgtgccccaggctgtggcacagaatttttacacgttggtcataacgagattcttcgccgggggttgtgtctccatcctcgccaatacctctggcacggtgattgggaatgtctgggacacagagctaaatcgcaacgttcctgtcagtctttttatcgttgcctacctgtcgggtagtagcattggccccgtcattggggctgctatctaccaggctctcacgtggaggtggattggctatatccagatcatgtggtatggcgctttcttccctctgtacttctttttgttcagagagtgtcgtggaattgcaatcctagggcagcgagctagggctctgcgacgtgaaggccagagcgcttatacccagcatgaaatcgacacacaaggccagtcgattttgagtattgtgggccacagcgcgatcagacctctttttctcttcttcaccgagtccgtggtgtttgtatcgacgctatggtccgcctttaccgtcggtacgttgtacctattcactcaatctgttgagcaggtgtttgtagccctgtatggctggacaccagcacaagctggatacgtccaatcagcagtcgtgatcggagaacttctgggatgggtggttaccttgttctcaggcaaactttacttcaactcggcatcccgcaacaaggaaattcccggtacgcctattccggaggcccggctgtacctcgctattgtaggcggtatcttcggcatctcgggtggtatgttcacatacgcttggacctcataccccaatcttccgtggatcgcaccggccgttggtctcgccatggtaggggctggcagtgtcattgtcgtgacgggaatttccgactatgtggtcgatgcgtatagcaaatatgcaggcagttgcatgggtatcattgccactggtgagaacaccctggctgcgttcctccctctagctaccatgagcatgtattctcatcttggcctccgatgggctagtacgctactagctttcattgcattggctctatcttttgccccgatattggtgctgatatggggcaaagagatccgtgcacggagtccgttcatgaaggaagccatggtggaaaagaggaggaagagtatcgactcggtctgacgaatttttctctgtacacaaagcgctatgaggaacatattgcacatattaaagatttaagaacttgtttgttcactgaatattttctcgtgtttaagtttatcgttctcccttcagggctgatgcccgtggacaagtaaatcaagaccatcctacgccccaggagtttctcaaaggcttagccatggggctttgagacataactagatagattttagtttgctctaacctaagatctaaatttaaaactatagccgacattctcacctcatgatccccctacttaagcaagaacacttggagagtgaactcaagactgtaaacttcaagcgacaagtggatcaattgtaagcaatatagtttgaatcagggggaattttcatagaactactccataaatgtcggagatattccagattgcggtttagaccagtattgcgctagcccgaaatgaagtcccccccttaacctcccactatatgtccttccacgtttgtttttcaaggccctcgaggcgaatgattattgttgcttaacgttatctcccgagaagaatatatctgtcagccacggacggaccagctagaaaaaaaagaagggaaaaaagggggaaaagcccactgtcctctgtatcgcaacccacgatccaactaccaagttaggaataatagccggattatcccgttagtcctgctccccttcaagaacgaggggtgagacaggctacgaatccgcctctcttcttcctcaatgagaagtcgtcaaacaacctgtttttcctcatgaggttgcttgcatgagtcgaggaatgacatccccacgtttctgtcaattgtcgaattctagatcgtttcagggcggacgatcaaacggtttgattgccggtgccctgtgcgatggtctgaccatgtacatatatagagttagtacggagtttatactgcgtttgcactagctgggtacctccgccgagactatcagctagtttctcaggggctggaaaaccttgattggagttgaaacctccagccagagtctatattgattgcatgagaatcgtggatggttagttctcgatctaatagcgccccattgagctagatacaatacatgctgtttttagttctttttcggtgtcttactttttggtttgatagtcgatatggcgatagtcgatacaatatatagatcagtcgataagagtagtcgaatgcaaccgtctttttagttcgacgatgagacatcctgacacgtagatacgtacactgatctgataatgatgatctatgtggaagatgacatgattgtacattcctgttcttcggatacaggtgtgcaaccatctcaaagtaccaagctcctttaggctactgatctcattgaaatctctgatcaggagaccgtacgcgacgagtcacagtagtctaccgactcacatgctgtggggtgtatccaaagcttggaattatgtcaccctatagaaaccctacggtacctgttacccatgtggtctagaactttgctcattttatttatgacatggctggctggggaaaagtggaccaggcacagtacaggtacagggtaaagatatacaaatacaaatctgtttggcttggttttgcaggtagaaagcactcaggtataatattgcgtctatataatataaatataatataaagttactaatagatactacgtgcccaggtggtaacccccactccgtattctccccattagacgagtcccatgcggcgggctgtggccccaaacgagatcagtcggaaataccggatgtacaatccaaagcacagtctacatacaattaggcctcggagaaaataacaggagaaagtcgggaaggtttcaatgcatgtaagcgcccactacacttctgaaacaacagggcgggtgcttcacatcgcagcgccagtttgatgagccttggctgtctccacctatcccgttggactcacagggcttttggccgaaaaggatatctaaatatggcaagtgatatgtttatcacttggttatgcagcctgatcaccatgtggattgggccaatcatgaattttgacatacaatactatacaaatatacaaaggggggtatattcgctttgataagaacagagtcttggtttgatatattccaagactaatggctattgcacttggatgtatgtgttgcttccaagaccatcttctctatatgtacggagtatcatctgggcatctatggaagtatatgggatgtgtacctgaccccgaataaactgatttccccgttcgaccctgtaaatgacggataaatacagcgtaaataaccggcaataccagattaatgacataaataacataaataacacccttggaccattaacaaccattattcaggcctccgcccggtatgactaagaataacccaaaataacattactagtttatgaccggtcagacgtccctgggcgcttcccccattcccagcttcgattattattagacttgactgtatcttcttcccccccttcttcttcttcaccaatactcgagcttcttcttcactttcgtttctttcttccgctgcgcgcgaaaatccccagaggcttaccggctggtccagttccattctctgacaatctctctttctttctccttgtctacgaggctggttcctccgttcccttagcctttcgtgcattccttgtgtgatctagaacatctcccgatcggatatcctctttactgggcgacgttgatcctcgcacttccggtcctatcccgttcacccattcagctggtgagtttgatccgaggtctcgcagctatgtctcagcagagtcgcagagggttccttgaattggactcagatcgcctctttgtttgcgcatgggttatcatgcggtcttttccccggtgctaattatctatatagtgcgcttttcacagacaaaatgtatcctcaaccaggtgctccaattccgatggcaccacctcaaaagcccgaaacttttatgctctccaccgaagcacagcgaagcctaccccatgacgcgcaagttgctcttcagcaagtggataatcgtatgtctttgggttatctttatcccccgcatcaaagcaatgtattgacatggggccagtgaaatatttccttctgtctgctcccgttgactggcaaccggatcaactcattcgacgcttcttgcttcctacgggcgactatgtctcttgtgtttactggttcgtctcactcttgagcgtgatggtttgggaagccgactaacccggtctcaataggagcggcctcttccacatctccggtaccgatattgttcgatgtctcgcatttcgattccaagccttcggacgtccggtgaagaactcgaaaaagtttgaggagggcattttctcagacctgcgaaatctcaaggccggcgtagacgcggtgctggaggatccaaagagcccattcctggacttcttgtacaagaacaattgtattcggacccagaagaagcaaaaggtgttttactggtacggcgtacctcacgaccggctcttccttgatgcactggaacgggacttgaagcgcgagaaaatgaatcaggaggccaccacggtcgcagtcagcgaaccggccatgtccttcgaattcgactcgtctcagtctctgtatgagcaattgaccaagtcacaacaagtgaatatgaactcgttcgctgcccacgcaagtacgacatatggccagcccaactcccccgtgcttcggaccgttgacgcaatgcctcctccgcagatggctcccccagcgatccctctgatgcaagacgactctgggaatcagatgtacagccaccaacagatgcccctttcgaacaatctagtccagagcatcattaagcgcgagcaggactatggccccatccagtacgatcgccacggaatgcccattccccgccctcatcagcgccactcttccatgccgaccttctacgagtactcccctgcgccatcctttgtatcttcacaatatgaggattacagcaatcgcggcctgtcctttgaaccagtcaccccgccacagcattcggtcggacttggatcggaaccggcttacatcgccaacgaagataccggactgtacacagcgattccagatatttcaagcgggcctgcctatcaccatatgatgcagctgcctccttcgaacctgtctagtgctcactatcagcctgtgccccggtcctattcggcaaacccgtatcccgtcatcgagggatccccaacatacaagcagcgcagacgtcggtcatctatcccgccgaacagcggtgctgcgacacccagtggcgcagctcatgtccaatcaacgaccccgggagtccaggcggtctcgtacgctgctcacagacctagtgatctgcggcgttcggtttctagctcagtcgctccagtcacggagggggatgaagccactcaggaactcgctcgcaattacccgagtgcgctgctgccacaaaaggatctttatcacgaaatgtcccgtcatagcacgccgctgcaaagcctggatcaaagcactgcacatcattcaggctcaatggcaaaccaacccaatgatctgacatctctcccaagcagtggtaccatcgagactgcggttcaaaatcataatgctcggtcagagcgttcagcgcctggtcctactcggagagccaggagtgcaaccatgatggagttgggaccgtatccaaccaaggcccactcttgccctatcccgtcatgtggtagaaccttcaagagattagagcacctcaaaaggtaagcttacttctattttgtcactcaccctggtggcgcaggtttcaccgagcgccggtgagttcgtttcaattgccgccgactaacccgtttttctagacacgtgagaactcatacacaagagcgtccgtacccctgcccttactgcagcaaagctttctcgaggtcggataatcttgcgcagtaagttattattgtcttatttattatacgacttttgctaatattcagtagacatcgtcggatccatgaagcgcagcaggatggtcagacaatctctcagaccgaggaagatctggagaacgatacacatgaattcggttcccccagggaagacatgtccccacagcccgctcacacaatgattagtatgcccaacatgacgtcgatggcagctcctttgagcatgccgtccgccctaaccggtatgccttcacacatgatcgctccgcaacttctccaacaacacatgtgagaataccatagagcacgatgtgtctgctgcaaaacagtagatgcaacatctcatgtaatcatcacggggatttgtctcaactttcctttctctttggagtcttcaaggcgcatacaggcgtcctttttgggttcggggcttattagcgcctcttgtttaatcgcacatggtctcatgctggccttgtacataccgcgatattattgtatagcccgtgtgttatgtctttgcttgtctttgacacagtctttcttttcctttggttttgttgggtttattttgggttttcgaactgtgcaatggtcacaggaaacgccgtgtattattggtgccgactgccctgcacgtgaattgggttgcgctggcagacattcatttcacgcctggcgggcacgggcacgagcgaggttcgactatctctcaatgggaaatgggttggaaaggaaaggatttgggtttgcttcttcttggatcgtcaggcattgtccacgaagagcggctgagaacggtaaggttattttgcacgcctcaaatcacactatatagacagagacattgtgtaacgacttgaattggaaacagaaaaacacttgaaaatcttcaactaccaatattttcttgctagtaaatgtccacggtggcaatgatgtgatcaagggctggtatggtcctgaggtagtaggtcacgtgccgctgacgtcgccctcgaggaatgggatctcagcagatcgcccgctgacacaccgcgctttgatcaacagggctataccctgtcgccttttagcttctctcagctactaatctgactgctggcagtaaatgatgcgtggttgccaacacccagcatagccccatctttcctttccgacgatatctacttccccacactccaacaatccacggtccacactaccacgaacacgaggattgtaaattagtgaaggaaatctccggtctcagcaactaccatcgaaaaggcatatctcagcttacttgagccccgagtcacagcacagtcagctgctggaaatcacagcaggcccaatcatatccaaacacaaatcacctagtttcatgagtcaatcctttcaacgcatcgaaagccggattccttaattttcccatgggagccttgaatttcaagcctgcccctggttatattgacgagagctcgcctctcatggttgctactcgctctgcggagaggcgtggtgtgcgcccttttgccggtgccgatgagtcgtctaagaatgcgctgtacatgttccttttgactctttctattggtgggtgagtagttttgtatggggtgatttgacttgtggtcatttattgatattgggtttctttgacagacttcagattgtttggtctgtcgaactttctaatggatcggtaagtataagtcgcgacttacaggagatgatttgaccccaactttgcaccttacccctttcatttccgaagctgtaagactgaataaaagaacatgctgacgggttacagccattccttctatcccttgggatgagcaagtcgcttcttgcctttgtttggatagccagtcccttgacgggcgcactggtgcaaccatacatcggtattcgaagcgacaactgccgactcgcgtggggtaagaggaaaccatttatggtcattggaggtgcagcaactgtcgtttcattgctagctctggcatgggtgaaagagattgtgggaggtgttctgtctatattcggggttgaaacatcagcgattaagattgttatcattatcatggcaacaattttcatgtgttgccttgattttgccattaacaccggtgcgcattccatcttcacttttttaatggttacttggctaatcttcgtcctatagtgcaagctgcagccagagcatttattgtcgacaactgccctacccaccagcaggagctgtccaacgcctgggccagtcgtatggtcggcgttggtaatatcttagggtatatctttggctatatggacctgccaaaggttgtccctttcttgggaaatacccagttcaaggtcctgtgcgtacttgcctcggtctttctgagcacaactgttgccattagttgcatctatatccaagagcgggatccccgagaagacgggcccgtgactgacaagcttggcttggtctcctttttcaaacaggtcatcaagtccattcggagcttgccaacgcagatttcccgcgtctgtgaggtgcagatcgcagcgtgggtgggctggttcccgttcctgtactactccacgacctatatcgggcagctgtacgtcaatccaatattcgcggataatccccatctctccgagggtgaggttgataaggcctgggaagatgctactcgcgtcgggacattggccctccttatctatgctatcatctcttttctttccaatatgttgcttcctctcttcgtggtccccttgtatggaccggcgccagagactgtttcgcaacgggattccctagacggtgatttagatggtgattcagagccagctgcaaggagactatctttttcaagcatcccgacaggcaatgcatccgagcctctgcttgacgttccagtcggacaagagaccgaagagaaacccacttggctttctcgcctgcgcatcccaggcttgacgctcccgagggtctggctcctctcccatctcctcttcgcggcgtgcatgttcagcactttcttcatctactctcatcaagccgggtcggcatttgtgggccttgtcggtgtctcatgggctgtagcattgtgggctcctttcgctcttatctcggcggaggtagctaggattgatccttctagacgaaatcgtcgccgagcggctcagactacttataccgagcatgcagatgaggcccaggatgagggtcccggtgaacttgacagcgtcggtggcagtgatattgagaatggacacccgaaagattatcgtgataatggggatgttgcacaggcgggtatcattcttggactgcataatatggctgtttctctcccccagattctgtctagtcttgtttgcagtgctatcttcaaggcatcccagaagcaaagaggggagccgtgggatgatagcgtgggctgggtgctacggtttggtggatgtgctgcgttggtggctgcatggttgactagaagggtttcggatggatcaagatagacatgatatgtagattgtacaatgcatttatcagttcttgtacatgttccgatgttgtatatattcagttttaggcaacgtataacaaacataaagattctgcagggaatagcgatcgtcgtgcaaagcatgtgggtcctacattcagccctagagtcaatcaaattatatcgcataacgatgatgtgttgcaccgaatcggccaaccctttgttcctgtttatttggccgaatcccgagaatcggcccacgtgtaattttaaatacacgatacgcaaaaaaccttacgctatcaccgtattgttccagtttcaccactaatttgggtctagccagccctgccgtattctgtattgtacaacccgtacctgacctcatatctgtccctctgatgcaacttaaacagtccgtgtcctattgctccgtactgctaacccaattcgaccttgtcgcaaccttccgctatccattcctttgtggattatgtgcgcctggtcctgccatcttgatatcattgtgggagtgaattgccagtccttcgctctggcctttgatacttcccaaggcgtgagccgcgatggctagccaatttatgaacgatggcctacacgccctgcttcgtatgtctctctgatcgatggctctgaacgttgcgcttcgatttttcatttggactgggagctaacatgtctatttctgttgtagggagggcctctgaagactccgaccccgatggtacgcgtgcctgaaccccctcatcgctcccctctcgtcttgtcgcgatatagcgctattcagcctcggaaatttgactaatatggactgcagactcccccgaggcagggtccaaggagatcacgagctcctgggcattgtttatcatgatcctgttgttgatgttcgccctcttcacgagctatatccttcagcagaggaagatccaagctgtccatgagacggttctatcaatttttgcaggtaggcaatatcctcgagtggtgcaggcgcgatctgaaaatatacaatatacaaagattcatctgcgcaaattggtacggacttgctaacggtcgctagggatgttcgttggactactcatccgtttcacagactccaccctccaagacagcgtcgccttcgactatcaattcttcttcaacctcctgcttcctccgattattctcgcctctggttatgagctccaccaggcaaactttttccgacatatcggcacgatccttacgttcgcgttcgccggtacctttatatccgcaatcgtgctcggtctggtgctatacctatggacacggatcccgctgagtgggctgaatatctcctttgtcgaagctatttcggtcggcgcaactctctccgctacggatccggtcaccatcttggctattttcaacctctataaagtcgagccgaagctctacactattatttttggcgagtcgattctgaacgatgccattgctatcgtgctcttcgagacggcacagaggtatcatgataccggcgcggctggctctttgacgttcttgaatctatttgaggccgtgggactctttttgctcgtgttctttggtagcatggttgttggaatgctggttggaatcgctaccgcgctgggtctcaaatacaccctcgtgcggcgcttgcccaagattgagagctgcttgatcattttggttgcatacgccagctacttcttctccaatggcgtgcatctatccggcattgtctcgctcttgttctgtggtatcaccctcaagcattacgcctactataacatgtcgcgtcgcacgcagttgaccaccaaatacctgttccaggtcatggctcaactctcagagaacttcatctttatttacctcggcctcgatctcttcgtggagcctaacctccagttcaaccccttgttcatcatggtggcagtgtttggtatctgtctctcccgatacctcgcggtgttcccactttccaaggctatcaattggttcattcggtatcgagcacgccgccgtggcgtggaggtccccgacgagttgccgttcgcttatcaagcgatgctcttctgggctggattgcgtggtgccgtcggtgttgctctagcagctggtctatcgggagtcaacgcgcccgcacttcgtgcgacagtacttgttgtcgtagtgctaaccgtgatcatcttcggcggaaccacagcacgcatgctggagattctcggcatccgaacgggtgtggtcgaagagcttgactcggacgatgaattcgacaccgaggtgacccatggcggaacctactataagcgctccggcacgagcctaggatacatcccgcgacgcaccgactcggtgatccccttggatggggtcacggccaacccacgcgctggacccggggagcgaacacacagctactccaccggaaacagtcgccgcccaagcccaccatatacccacacaagaatgtactctgccgcgtacagcaacaaagatcaatcctggcgcgaccgccaatctaccgcgacgttactcaacggcgcagctggaccgagtgctggggaaggcagcgacgacgagttcggcctgccaccttcaggcgccagtcgttccaacgatcacactcaccctgatgagttcgatcttgaaatcgagggcatctctgacgatgacctcccgccggctgcaaacggagcctcacgtctccgcagatccgcctcccagccccctcagccttcgaccgtcttacccaccagtgccgcggcatcgaccagcgtctcgcccagtcaccagccagcgggtatgtccgcacgggatgcgatgcgggggctgttttcgggtggtgcttcgggcgaccatgcggcttggttccgccagctcgatgaggactatatcaaacccacccttttactagaccagtcgaatcataagggccctgggcctggtgcggtttgagatgatgatacgttggaagtgacttccattttgttttgtttgctgtgggtgtatatttagccttgggtctgcattgtcgatgttctgcttttctgcattttggcttccatccaaagcctgattgcttgtatgaggttgcgtaaacgaaccccggtctaaacttatagaagtcaacaagatcttcaagtgggaactacaagtaccctctgtaaagtaacagtcatagcattggttttccaaggttctccgcactttgatgttgcccgttaccccacactcgggatatctcacctgtaaagggaagatggtcaaaacacccgactgagacaatccaaaaagcgtaagacgaaggaacaatccctctgtctccgtcgatggcgatttaataaacgtaacaccctgcgataagcaaaagcttcgccctgggtaggtacagccgtgcgttcctatctcttccagccttatcgcccactcggatgagcgacagctatctgcgctggatggcgtaggtccgacatacggcaccatgcttgtttcgggcacacttacgcccgtgcctatcttcttgtcatctgatccctatattagcttctgaggcttgcggttgtgctggtatgttttcgaaccggtttgcgccgcttttagaagggggctttataggagtagatgtcagcacggcttagtcttggtgatctgctaaggagtataggtaattacgatgctgtatggagtaactacatatacgtacctgggttgggtactaggcagtcacaagaattgaagcagaacagggcaatatgaggcccgcagatattgaggtgctaccttgcatatccttactatagggacatacattatgatcagtatacgacttgaatatgttggagtacgcagtagtaaagctgcctatcaagggcttttgaaaattcatgatcacctaggcaacctgtcaaacaacctacaatactctcagtggcgtactgggttctactcagcgatcaaaaggcagcaagggatgaaccctaagggagaaaacggaacgtttcaagatcacatacaagcttgtatttatgctttcgcgctccgctagtccagccgcctctaacctaagttggctcgaatatagaagtgatatgcaaaatggtgtcatgtacccctcaccgtgcagtacagatagatcgatctagttatcttgtagtattctagaattggaaggtattcaacggttatgtctatcgagaccgtggtcggatggcaaggatctgcgcttagaccttatcgagtcttgagtcggtgcttatagtacttgtgtccatcggaatattttgagacctaaacctcctatttttctttttgtcccgagggctctatttccatcgaatcttaggtgttcctcttcgatcgcgtgggcttttgtttgcctacccacgacttcatttcctctataaccattcctaccctagccatggatgatacaatggagaaagtgttatcccataaggtcaagaggcgtcagtcgacggctacaggtcatgactcgatgccccaggctggagataccgagttgctaggtgtgtataatccccggcttattggaaattggtgttacgatatgagatcttgtcactgacggatcaaacagcaacactcgggtacaagcaggaattgcggcgtcattattcgacgattgagatttttgctgtcgcttttagtattatggggcttttgccttccattgcatcttcgttggcgttttcaatgcccgctgggcctgtgggaatggtttgggtaatatactcctcagcctgaaattggttcgcattgtgactgacataatggatagggtatgcatctattctttcaggagtatcgtctggcaattgctaacagactccttggttaggatggttcgttgcgagttgcttcatcttccttgtggccttggcaatggtatgatttactccttatataaccctaaaaaccacagaactaataaccaccaggccgacatggcatccgcaatgcccaccgcaggcggactctatttctggacacactactactcatccgagaaatggaagaacccgctcagtttcctcgtcggatacagcaataccatcggcctgatcggaggcgtatgctcgatcgactgtgagtcagatgcaatctcaaacaaaaagcccataattaacacatcctcatcagacggtttcgccaacatgctcctctcagtgatctctctagcccgcgacggcgaatggtccgccacacgaccagtcatatacggcacatacgcagcaaccgtcgtcgcacacggcttcatcgctatcttctttgcccggatcatgccgaggatccaatccgcctgtatcttcctcaacatcgctctcgtggtggctaccgtcatcgccctgcccataggcaaagcgaagaatagcccgcctgtcaacccgggcacgtatgtctttggggaggtacagaatttcactacttggcctgctggatgggcgttcatgctggcgtggctctcgcctatctggactattggtgcgttcgattcctgcgtgcatatgagtgaggaggcgacgcatgctgctcgcgccgtgccgctgggaattatctcttctgctggactatgtggtattcttgggttcgtttcgctggcggttattgcggcgtcgatggatacggatatcgaggggattctgaattcgaagtatggacagcctatgactcaggtatgttttcgtcttctttcttttatggggtcgtactttctaatctgggttctttatagatctactacgacgcccttggcaaaagcggtgcccttggcttcatggtcgtggtaatgattgttcaattcttcatgggactgagtattgtgagttcccgtcttaccatctactcgaaatcccagaacccattcactaatccacccacccaggtcctagccgcctcccgccaaagctgggccttctcccgcgacggcgccctccccctatcctccttcttccgcaaagtaagccaacgcaagttcacacgctaccagccagtccgcatggtctgcggcatagtactcgcatcgataatcatcggcctcctctgcctaatcgacgaagcagccgccaacgccctcttctcgctcgccgtagccggcaacgacctcgcctggctaacgcccatcctggcgcgtctgctctggggcggcgagcgcttcgtccctggtgagttctatacaggcgcttatctcagtaagcccatcgggtgggttgccgtcatctacatgatgtacgttattgttcttactatgattcctaccgaggggccgaatccgtcgcgtgagttctattactattcccggtgcttttgcttttgctgacagtctgtttgaagctcaaaatatgaattatacggttgttatcaatgggagtctttggcttggggcgttgctttattattatcttcatgcgaggaagacgtataagggaccgcagactactgttagtcccgaggatgagggcaaggctttggagcaggactcgaaatagttgctaagatatagatagacgtttgggtgggacttcggcccgataatgctcggtgaggctttgttaactattcctatagatcaagttcatgtactcaatactacaagtttactctatccccattggttggggagacaccggggatttcagttccaaattcagatcagatttggccttcaatatcgctaaaatcaccctttcaacagggctaataattgtcgctagacattaattctcgttcttctttattttttcgtttcttcatcatttcttcgtcgttcttcgtcgttcttcatcgttcttcgtcgttcttcgtcgttcttcgtcattccttcgtcgtttcgcaaaagcaattacccttctgagtctcattccagactcaacgcatagatgaggatgcatctattcaggaatctcgaggacgtagcggccaacgatcttgttttcctctggataacatagattagcatatggcatatcaagtaatcgaaacatccaaacttacccatgagcttgaacacctcaggcagttctttcaggggaacaaccttgaaaggagccttgatcaagccacgctcgtagaattcaatggcctcgacgccatcctggcggttaccgacgtagctacccttaatggtaaccatcttgacaacggtttcgaaaacaggggccttgaggaacgcatgggcgggaaggccaatggcaacaatagtaccacgagcgcgaacgtactcgacagcctgctggaaaggcttctcggagacagcgagcaagagcacagcgtgggcacctaggccaccgggagtagcagccttgacatctgcaatgacatcggtagacttggtgaaatcgatgtaggtctgcacaatatattagcatgatcccaaaaagttgtccggaatagaaaagcgtacctctgcgccaagctccttgcacatcttctccttctcctcgccaccgtcaatagcaagaacgcgcaagcccatagccttagcatactgctgcgcaagcgaaccaaggccaccaccagcaccaacaatagcaaccgtctgaccggggcgcgcaccggactccttgagacccttgtagacagtaataccagcacagagaataggcgcaatagcatcaagcggcacatccttgggcagcttcgaaacgtgcgctgctttaccaatcgcgtactgctggaatgtaccatcaacggtgtatccagacagctgggcatggggacacaaaggctcgtcggaggattcgcagaactcgcatgcgagacaggagccgttgagccatttgatgcctgcgtggtcgccgatttcaatgtcctgcacgagagagccctttgcgacaacaacgccggcgccttcgtggccgccgactaggtgatccttcacggtgaggggccagtcgccgttcatggcgtggagatcggtgtgacacacgccggtgtatcgcatcttcacgaggacttcatctgcgcccggctttgcgacggggatttgcttgtacacgggtcgttcgcctttatgttcgatgatttgcgcccattgggtctcggggatggtcattttggtcattttggtgggggtagaatacttggttaaatgatggaatatgtgtgaaggtaggaagaattgtctggaaagtgtttgagtgagagataatggtaacacaggaaaatacatgtcggcgcaggtgttttatagcaagcgcattgcctgatcagggcatcggctgctttaactccgtgagctcttcgaatccatccggttctctggtagattcggcgtatctctgtcattctcacacaatagcctcggaataccgtggaatagctacataatcggctttgtatccacttcggctcccgtttgcggtatacagtactccgtctacagcgcatggttattgtccgaacatctagaccttgacgacttcgtaactgtccatctctatcgccaccacatacccaataggtgtccggtgagatcgaagcatcactccatgtcagcttgtatgcatccatgaaacgggaacctgcccatcgaatcccatttggaggaaagacgaaccgcaattggatacagatacacatatgggaagaccgacgatcacaactatgacagaacatgtccagacattgtgccattccaaggttgtgctgtccacgtccatatggggagtggaggacgtcatctcgaacatcaggccatgcggcacgcggggtatggccggagatttagagatttcaagctgttcatggcgaggctataaatatcactgagatttgaatcagtatatataagtgtctcgaccttaatagaaatatggtttatattcatcccagtttccctcttccgggaaatgtcgatctgagattggtggttgacctgaggctatacatatcctttgactctttagcttggctattataaggttggttcttagtatatgcattatatgcatatacagatctattataatctattatagatctattgatgacatatgaaatactttatatccaacgtggtaggtttgagttataacttataagctggtagctctggagatgtctatgacccagacctcttatataccgacgaatccctatttagtaattctctgatgtataactagtcataggctaaacaagataaccagattgatcttcaatccaagctctaaaacataaaaacaaagaccgaccgactataatcccattgaatccaatagaactggtctccacagggaggtggatagggcgatctcacgataaactcggatcagcgaaacagatttcacgtcaaatgcgagtggaagcgaggactcgctaattatctgaactcctgcacttaggactagggatattcaacacttgaacgcattggaacaagacattccatgttgatgatgttcgtcctcaccacctctgtgctccacggggtgtttgtatggactctgagcgagatcggggcacaacctgggaattctcgaccagctagaaaagaaaaacgatagagaagaacacgaaaccattgaaaatagtcgtctaaaacacagaaatcaccgctttccactgtaaaaagcccgttcggatctaacccccgggatgccggagttggtgaaataccccagacgaggaagagattcacgagaaatgccaaatctcgtcaactttttccccttttacccttacgagtcgtcgtcttcccctctttcacccgacttcatctttcgtcctcagttattcctccattcccccattcaccccatctctcccttctcatcctcaaccaccgcccctgcatcagctcgcctaggcccgcgcattctctttcttgggctccacggaaacttcccttcttcctgcatcttcccaccacaaacgaatccatccctccatcaggtatttatggctcgctttcttcctccatctcttctctttcatccctcttcactccgaaacagatcctacctgaaaccaacaactgacaccgcgtcactagaacgccggaacccccttgacaggtgtctctgagcaggggtcttggactcttcttcctcaattcccgccccgaccctatctcgacccgagtgaccaacctttgacgcgctcgacccgtaaccggggaccgcggccatcatgacgggccctccgccatacaacgcccagtccccgactcagcagcagcggtatccggcttacacctctccgaataagaaccacccgtattacccaagcaatgaaccaccgcaaccgccgcagcagtaccaccagcatcctccgcagaccccacccgcatttggtccatcctccgtcgcgcgaagcccgcacttttcgcacgcgtccccaatgccgtctacattgccgccgcccttgaacgggagtgcgccacatcacccgtcgcacctggagtcttcgcaataccagggacattcggcaccgggttctcagctcccacttccgcgcccttattctagctccgtgatggcgggcaacggtgcttcgccgtatggatctgcgacaccacatggacatccgcccagccacccagaaggccattcgcaatctcccaccagggagtccgaatccccatatcggatgcgaggtaatggtatcggatatggacctccgatgatgcgagagccgagaccggcctcaccgcaggaagccgtacgcattacccggacccttgcaatatctgctggtttactaactcatccctgcctcgcagaaacccgctcgagccgcagaccccatgtcgttcgccagtattctttctggcccgtcggacgatcagcctgcgagaaagccatcgcctctcccggtccccatgatctcctcccacacgccgcatgctccccctgtctttatacaccggcacctggaacacactacacctgtagctattcatcacaaacacgagcaccgattagactttgatagacacatcgatggcccgagaccaccacatgcgaccaatgggttcgtcaagcccgatgcggaatacgctgcacccattcctcgtgcaccgctccgaaaaccattccctcccggtgtggatctggagcaggtcaatcgggcttcagccgagatcgatcacgccgagaagagcgacgttgaagatcctggcttcgacgcagaacaagagcggtatcgggagaaaggctacaaacggtcgttggaaagcagccgcgcagaggaagtgcgacgaaaggtaggtcgtctgaaagtcgttccatgtccagtcaatcccatactaacatatgctcagcgtcgccgcaacgagttcctcatcgatctaggtagatccttcgaaagacaggccattcttggcaccgaaagattccgagtgctcaacgagggtgctgtcatggctgaagttcaacagaaggagatccaggatgaaaaagaacggaagaaggacatgcagcgcaagcgccgtcgtgaaaacactgtgcgccaagagatgcagaagaagctggaggctgagcgcaaggcaagcaaggcccaggaacccggagaaagggccaagttcctgcgcgaagccgagcgggcacagaagaaaatccgcaccaccaagcgcgctctcgaaggcggcgatggccaggatgagctcggtgaagtcaccccgcttgctcccaatctcgaaggcgggacgaccagtcaattccacatcggccgttcctcgcccagccgacgcaggtcgggccgcgccggtcctgtcactcgtcccaagaagtccaaggagcagaagcaggccgagaaggatcttgccgaggcagcttggaatgctgggttggacgacgagttgtatctcaccccaagtgcgagaaaggatgttcgacgctcaaaggagggtactcccatctcgcagctacactacgacagtaaaggctataaccagatctacgagcagatctggcgcgatatcgcacgcaaggatattccaaaggtctaccgcatcaaaacctcctccctctccacccgccaggagaatttgcgcaagacggctcagctggccagcaagcagtctcgcaagtggcaggagcgcacgaacaagagcaccaaggatactcaagctcgtgccaagcggacgatgcgtgaaatgatgtctttctggaaacgcaacgagcgcgaggaacgcgacttgcgccgtgtggctgagaagcaggagcttgaatcagccaagaaagcggaggccgaccgcgaagcaaaccgacagaagcgcaagctcaatttccttatctcgcaaacagaactgtactcacactttatcgggcgcaagatcaagaccgacgaagctcaaggggacagcgttgttactgccaccggagagaccatccaaccgggcaagccaaatgctcacacaatcaatcttccagacagtgtggccaaccctaacgccaagaccactgcattcgaggaccttgacttcgatgctgaagatgaaaccgtgcttcaacaagctgccatggctaatgcgcaaaacgctgtgcaggaagcccaggaccgtgcccgcgccttcaacaaccaaggagagggcgacaatatggctgcatttgacgacggcgagatgaacttccagaacccgactagtctgggtgacattgagatctcacagccgaccatgttgaatgctcagctcaaagagtaccagcttaagggtcttaactggcttgtcaacttgtacgagcagggtatcaacggtatcctggcagacgagatgggtctcggtaaaaccatccagtcgatttctgttatggcttacttggctgaggtgcataacatctggggtcctttcctggtcatcgcgccagcatccacactacacaactggcagcaggagattacaaggttcgtcccgaacatcaaggtgcttccctactggggtaatgccaaggaccgcaagatcctgcgaaagttctgggatcgcaagcacatcacgtataaccgtgactcggaattccatgtcctagtcacctcttaccagcttgtcgttcttgacgcgcagtacttccagaaggtgaagtggcagtacatgattcttgatgaagctcaagctatcaagtcctcttcgagttcgcgatggaagaatctgcttgggttcagctgccgcaatcgtcttctgttgaccggtacgccaattcaaaataacatgcaagaactgtgggccctgcttcacttcattatgccaactctgttcgactcccacgacgagttcagcgagtggttctctaaagacatcgagtcgcacgcccagagtaacaccaagctcaatgaggaccaactcaagcgtcttcacatgatcttgaaacctttcatgttgcgtcgtgtcaagaagaatgtccagcaagaactcggagacaaggttgagaaggacatcttctgcgacttgacataccgccaacgtgccttgtattccaatctgcggaaccgtgtcagcatcatcgacctcattgaaaaggctgccacaggcgacgacactgatagtagcacgctgatgaacttggttatgcaattccgcaaagtctgcaaccaccccgatctcttcgaacgtgccgaaacaaaatctcccttctccgctgcatctttcgcggaaactgcatccttcgttcgtgaaggaaactttgtcgatgttcgctattcgactcaaaatttgatcgaatacccgttgccacgcctattgtgcagctctacaggacgacttgatcttcctggttctgataatccccgtgtgggcttccaaaccaagtacctatcccagctgatgaacgtctggacaccagaaaacatccagaagagcgcacgtgacaatggtgcattctccttcttgcgtttcatcgacacttctgcaggggaagcaagtgagatggcacgacttggcgtctacgaacgagcagagcgtcgtcgcagcaagccaaacaggctttctgccttgaatgtcatctatgatgagagtgacgatccaaagaactcggtcctatcccattcgatgttgaatattgttgatcgtaatgatcaacaggctgtgcgagatgtcgccattgagggccgaatgaaggatctcatgactgtttcacgctcctcattcgaagatcaaggccttcaacttattgagccttgttctagtcccaaagcctcggcgcctcccatcaccatgtcctcttccggccaacagacaacacgggaaacttaccaagctttgttcaatccctccgttcgacaagcactgtctggacactgcagcaggcaacttgaggagcagatcctcatcaagaaactcgatcctacaccttactctcacgctcctatgctgccgccaccggtttcactcaagggccgctacagccacatcgaggtaccatcgatgcgtcgtttcgtgacggattcaggcaaactggccaaattggatcagctgctgcgggagctcaagcccggtggtcaccgcgtgctcctgtacttccagatgacacgtatgatcgatcttatggaagagtacttgacataccggaacttcaagtactgccgactagatggaagtaccaagctggaagaccgccgcgacacagtcgcagacttccagtccaacccggatatcttcgtcttcttgctgtcaacccgtgccggtggtcttggtatcaacttgactgcagccgacactgtcatcttctacgactccgattggaaccctaccatcgattcccaggccatggatcgcgcccatcgtttgggccaaactcgccaggtcactgtctatcgtcttatcacccgcggcaccatcgaagaacgcatccgcaagcgtgccttgcagaaagaagaggtgcaacgtgtcgtcattactggcggtgcttctggcggtgtcgacttcaacacccgtgctcgcgagaaccgcaccaaggacattgccctgtggctcgccgacgacgacgaggccgaactcatcgagcaaaaggagaaggaagccatcgaacgcggtgagaccctcggcgccaagggcggaaagaaggccgctcagaaacgcaagcgggatcttacgctggatgacatgtatcatgaaggtgagaacactcgaccactccttgttatgttttaacgtccatactaatcgattacataggcgagggtaactttgacgacgccagcgccaaaccctcaggggcggctacgcccgccgaggaacctgtcgaggtaccttcagcaacgcctgcaaaacgcgggcgcggccgtggccccggcaaaggcacgtcgaaacgagctaagaccacgaaagagcgtcttcgtctgattgacggcgacggcggccttgattaatccaatgactgtcaaataatgcaactcggggcggcgttcaaggtcacagctacttctcttattattttcttttgtcgattggtcaatccaattcctccttatcttctactttccctctttcccagttcttcttatgttctcaaatggcagatacatgaactgctctgtattatcatacgaaccttgactatgttctgaaacagcgacgtgggctcagtatggacatttcccaaacaaagtctagtggctgagggtggttgatgcaatgatgaaaagatgattttctttccccctacgatagactcgatcctggcttttgctttggcttgtggctcatgggtggttgtggcggtctctgtgaacttggtgtgatttgttctttctttttcccccattctacattcttccccttttttccccttctttttctattttggctttcctgactcgcttgtatgttcaatgttcaaaaagggcgcgagtgttttagtttggttatgagtgtcaatgtattggtttgatggactcctatgcccttggtcttggtttgttcttgaaagaaattgtaggattaggtcttgtagtgaggtgtgcttctaggtcaagaatggtgatggttgatggtaaagttgtatacttagcttgccagccttgctcgtcattcagctctttgagcttataatgtcccagatactaggaagctatcatctatgtacatatggtgggcttgagcgaggattgtaccggtagccctcctcttgctgatatcagaagaaacaaacatgatgcctcacaccaaagcgaatgccagttctcaaacaagtcagccggaaataagagacgccgttcctgcccctgccctcatcatcacgttaccatctaattaagcgagcccacgtcgttgtttgtctcatttgtgaatagtggcataaaccgaccgcccttaagatacctataagaaggcagccctgcccccagaccttcctcttcttttcttccttcttcagctcctctttgccttctggcttagatcttgtgtagtatctgttcttgtcagcttaatctctgatagtcctgcattgcgggtcattcatgattattctaatctttggacctcgcgacttggtctctgtgcttgcgcatgcctcgttgcactgtgtcattgggcttacactacccccgattgatgcgaacttccttttttcatcaattgttcggcttggctgggcgtttggagaagatggctgtttgggttttatgttcttgtcgggtgggtccgttgtttacattgttgattaacagaggtcaagaatactgttgtttgaagttcctattacatgtgtctatcaacttggtccttgttgtaacttactctcatctcagaactggaggtggggagaagatagctttgtcttggggtcgagatacgatagctctctggtccctctctcttctcgtctccgttccttttcattcctagaatgagtacattgtttctctaactgaactacagctactgactatctggtaaacacgatcttgacacaatggaacttccacccttctctcggggtcaaacccgtctttcattaatctgtggcctccgagggacaagtgatgatgctgagatgaaattacgatgaacttatccacaaggagcataccagttctctactgggtgatggaaatattatcccaatgatggtaagcatactatcttctgccttctgttgctaataacttctggcagaacacaaagcaaacgcgatttcttctttcctccccgtcacgctccatcgccccaatattcctccggcagaacatccatctgcccccatcaactgtcccgccgggatactggggtgagtatgagaagacatagttggtatccttccaccgacggggatttctcgcatcgctgaacgaaatcggaatcaaaaatacattgtcataccataatcagacagacgatgaggggtgttgcccaagaaagaagaggcacaccaatgctcgctctcggctttgcctgttcgttttgggtgccaggaggaaaggaagagggaggggacaagctatctacttctagctaccgtgtgggatctgacagaccgaaatctgccatgtctctcgcggggagatccctcctgcgcaattgactatgctcctctggagttatcgagctgcaggagatacctcttccttcagaaagtgagatgaactactacaatgtaggaaaggaatccacgagagattgatgacatttgtaaaactaggataacgatctctcctcccaggatctgtccccactttgtagcagtaagcttagtggggggaagatagatgatgtattatgacctccttggtgaggttaactatgaagctatgactaagctaagcttgtgacactgggttcttttctaatcgtgtaaccaacacattccaacatcgaatgttccgcttggccactgtgcctgtcttcctgctttttcttctggtgggggacaagtttttggttggctgcatcttagtgtaggtccgggagagggaaatagctgacacagcaagaggttcccttgtcgtggtctaggcagtgggttagttcctcataggaagagataacattttgaaggtggaggctagcttacggaaccaggcacttttccgtgtctgctcagccaatcttggaagaacaaaggggggctgcactcatctctttctcacacaagatcctccacaagatcctcgagctagatggggttctcattcagccatatcagcaaaccccaccgagtatggtgcgacgattcgaggtaaatctccctcaactccgccgcaaattcgtccagctctatagcacgggcgcggtcgtggcgagctgggaaatagctccaaccacacacacaccaacggtatagtggggatattatttcgacagcatttatgtactgccatgaaatcctcaagacagagaaatcttggaggccttttgtgacattcgagggtgactgccaccaaccaagaaccatgtattcctgcctcaaacaattcggcaaatgttgagatgcggaacttctcatgaaattcggggtttcgtggtatagagattggagcggtgctgtgagaggaatcttttcactgctgaacaccatgcatatagtcgttcaggtcgcttgggtattgtgtgatggtgactgcgacaagaacggtaaatggctttctgtgctgtatccgagtgcatttgcaaaaggccttcattttctttatttgagcctctgtgactgccaacatttcttctgtagctctggctaaacgagcaccgatggacaattcggtatcgtggaatgccccgaagctgcgcagatgagaagacatgattgttgttgagaaacaacccaggaacaaggagatggaggaaggggatgcgtgccaattggttctgatgtctccattgattacttccgtataatctttgatcactcgggaaatttctctcaataccaatcggcttcagaaaccttgcacttgggggtataggttgcgatccgggtcattgacgacttcgagagtattatcgctatcattgaagctccatggtatcggactgcggtacgctttcgccactggcagttggaagatgaccgtgtgtggtcataaatatatatataacttatagcgctaggaatatttgcaactaaagttctaaatttggcgccttggtaaaagttagtcctgttcacaatgagtacttcaagataactgatctggaagtgagacaaaagcgaatggaatctccatctgagcgagagatactttcttacctatgcgtcatctcgcttcttcaggggtgatagcatcatccttctttcgtctctcattcccctattctctgggatcgggaaagggacatcatgtcttggcagttcatcaccattagcaatctctggcattttgagtcacgatatgataaggtaagagggagcgagacagaaaggctatgatgaaatataaataggtcgagcttcttcaggtgttgccgggatgaagaagatggtctatgggcgtttataggcataacttataagcaaataaggcaataacaaacaaaatagaagtaaacacaggtctgagaaaggagacaatcggatgtccatttcttttctttttttccttcctcttctctgctctctttcatttcgaccgtccgctccgcactactacagtcccagccagcactccattggccaagaaatggatgcccccaacgaggaacattcgcgaccattctgaggttacgaaccggacatctccacagagtgcgatgagatcaactcgcttgaaggctgcagcaaccaccagaaagcccgagagccacctggatacaccgtacatacaccgtacgcccgtgagatcttgcggatgcacaaggaagtggtcgcagcccgagaagagtacaacataaagtacgcttctctagaaaccagaatggaagttcgctgcatcaggtgaccttgggcccctttagccagagatacaatgcatcatcattatcttccccggagctttgtaccgttacagctcacttcgctttgacatatccctacctcaatacttcattgtcatttctcattgaattctcgaattttcttatattctgccccctttaatataagcccgcacccgtaattcatgtaatggagccagaatagcgaagtcatcttcattaccgatggcgtgttgatgaatatcaacccgcttagggacgggctggaatggttggcctaacgagttcccgtcacatttttagctacaagtctcgtgagagcctgttagtcgagtctgtacagtttgtggttagatattctgcggtgggattctatggagtgtaatttgcgttagttgattggtttctacggtacaagacgctggtgcttaccgtgagcattgttaggttttggaggcgggggcgggggcgtcctcaggtaagtgatgaagatcaagttcaaatataccgtaaaagggtccgactgattgacacaatgattacaagcttgactttaccctaaacttgaaagatgttgatattgtaggtccacatggatgagtggggttgttgttgttgttgtattatttcatgtccatcgagatatgggcgaagcccgtatttctatgacctcccatggggtatggggacgtgctaagctatggtattatgtacaaagttgtgcgcctagagtaagcaactccttccaatgaatgatctggctagaggcctgtcagctgcccgtccttctccgaactgtgaaatggatgtaggatcttccgaatgcggtttcccgcctgccgggacggcggcccggcttgcgtctgttcttactgcggggtgcagttggtgctttggtgacggggtttagcccgcctgcttcgcgaggcagtatgccggtggatgagtagagtgttaggaaaatgttcaccataaattatagtccacgagtgtataagaacactttttgtagctagatttctttctatttcgaattacaaaattgatagaaagtcaagatgatatgctgaagaaaccaaatatgactttgcttgacaggattgcttgaatgtagcccgggattacgcacttacgtacttcttacttgcagcgcagtcatttatattttgatcctgctttattatgtctcatttatgctaagcattgaccacaagctcaagcatatttaaacggagcaccttaaacctagtatcataatagtcaggcctcgttgagatttcggagagcacacgctgtctgaagtggcgaggcgtttagggttatccacgcaatgtgtcatttttcatgattatataatcatgcaaaatctggcagaatttagaatgaagtggacggtgagcacgaccccactttggcaagaaaagtctataatgtggagtacaactagccctaatcaggtagtcttggcgccactcactaactatggacatatggtatgatcgtagaacaccgatgccgggccaaattcacccaaaagatcggggtttacaaaaaagataacggggatctaagctgacggggtttgactgcaacacaagttgccgtctcccgcaaagcccgcggtagtgaggcacatcgggaaggaacatccgtacctcgggatttgcctcggcaggccaatcggagtctttcgtatgtaagccatccggatcagtcagcagccccaattgattttccctctggttccgccggctctcaacattgttaacttgtgcaatctcctaaactcacggggatttttgtgtttggcttcttttcctcttcatctctttggctcaattcaactatggaggctcttttgcaacagtctcgcactatgtgccctttcctcaagcgcacatctcccgccaccctccgcactctctcaaccgctactcgtccctgcactagcccgggcggtggaaccatgtccaacctgcaggttcttggtcgccgatgcccagtcatgagcaaggctctggctgtgcagagcgctcgtctcagtggtgccaagcgcttcacctcgcgcgctgcgggagtcgcttccgtccagccattgcgggttccgactggcaagcgggcgttgcataccaccggtggtcatcccgccagtctcgcctctggtggatacgagaagaacgatcgaggaaaccctaacttggccacgctccgctcgtcccctaccgccgccagcgccagcgccggggccgcagtccgcggtccccgcccggaagcgccaaccaacgaaaggttcaactacgacgatttctataacgtggaattggagaagaagcacaaggacaagtcctatcgctacttcaacaacatcaaccgtctcgccaaggagttccctcgagcccacactgcctctgttgaggagcgtgtgactgtctggtgctcgaatgattacctgggcatgggccgtaacctgcaggtcttggactccatgcacaagactttggacacctacggagccggtgcaggtggcactcgcaatatctcgggtcataaccagcatgctatcgctctagaggaaacacttgccaagttgcatggcaaggaggctgcattggtcttcagctcttgctacgtggctaacgatgcaaccctagcaacactcggtagtaagatgcccgattgtgtcattctctcggacagcctcaaccatgcctcgatgattcagggtattcgccactctggcgcgaagaagatggtcttcaagcacaacgatatggaagaccttgaagccaagttggcctcgttgccacttggtacccccaagattattgcctttgaatccgtctacagtatgtgcggatcaattgcgcccattgaaaaaatctgtgatctcgccgaaaaatacggtgccatcactttcttggatgaggttcacgctgtaggcatgtacggcccacacggagctggtgttgccgagcacctcgattacgatgcgtatgcatcgcaggatacagccacccctcaaagcaccaagggcacagtccaggaccgaattgacatcatcaccggtaccttgggcaaggcctacggctgtgtcggtggatatattgcaggctcggcagctatggtggacaccatccgctcccttgctcccggtttcatcttcactacttcgctcccaccagcaactatggctggtgcggatgccgctatccagtaccagtcccaggaaccccgggaccgaattcttcaacagctccacacccgtgcagtgaaggccgctttcaatgatttggatatccctgtcatccccaacccctcccacatcgtgcccctcctggtcggtgatgcggagctggccaagttggcctccgacaaactcttggaggagcacgacatctacgtgcaggctatcaactaccccaccgttccccgcggcgaggagcgtctgcgcatcaccccaacccctggccacgtgaagcaccttcgcgaacacctcgttcaggccgtgcaggccgtctggaacgacctaggcctcaagcgcaccagcgattggaagcgacagggcggtttcgttggcgttggcgttgaaggtgccgaggccgccaacctgcccatctgggaggacgcccagctgggcctgaaggctggtgagaccctcgagaccgctgtcgctcgtgagttcaacgacgcagcttcccagaccaccgtgctgcccctgaaggctgctacccctctgaccgagaaggcttactcggcagtaaactccgctcccgttggtgtggttgcctagagcagacgaacgccgtcttttacgcttctcggtttttggggtaatagctacattattcccgtccattcatttattataatattgtatcgtacggacataacttgacgtatgcatccgtcttcaacataccacatattgatgtcatatcaactgtctgcctttattcaaatgatgtagtcatcttacagcttggattggccgttaattgcgcttttgtctgttgatgtatgccattgatttggttggcaggaccaagacggatgtcggatatcctgcctgcatctatattgatcgagtgtcatttattgggctcaagtgtaacaggttggaatgaacagagttgaagtggtattttctttgcatttcatgtaggcttcggcttgtgtagtatatgttgtaagtgctactatggaaatatggaaatggccagtagtattagggcactgatatatatattcgccttggatttgaactgcctccactcaattgcaaagaagcaatttcaaataagtttattttggatttataagtctttgaatagaaaaccaactggaaaaccgggcgaatcaatctagattctgctatatatgctagtagtgaaatagtataacaatttgtataaatactaacaatcgggcaaagaggcccaaaagtccacacagaatcaaagaaaaacgaccaagtaaattcatttggctatgtaacaacgtctcattgatatagaaacaggtagaagtaacaatttttgaaacacacaaaagcgccatatattcaaggaagcctgacaactcaagaccgacaaaccaatcaacctccctacctccgaccaccacggctaaccttagggaactcaacaggcacgcgcaagcgagcaacacgacgcgcatgcgcctccgcacgtccacccttaatattccacttggcgaactccgtctcacgcggcttatcaatgcgacaaccgagttcacggaagtactggtgaatagtattcggatcgagacgcagatcatcacgcagatccgaaggatcagtcgcaagctcgttgggcgcattaccaccgagtgagctggagccaccgtcgcgtgccggctggggcgggatatgcagcgagagcgcacagatggtagtttgcaggagggtgaagtcgttcttggagacgtagccgccgctgggcgcgaagcggcgacgcacggcatcgatcacggactccggaagcaggtctgcggaagcggcgtccggtgcagcggcgccgggcttgggcttcgtgacggaccccgtggtgtttgacaggatgcggcggaggtcttcgcggggcgggagacgcttgctgcctgggccgccgcccttggcgttcgcgcctgcgtttttgagacagcgtccgaactcgattagcagctggatgaagcggaggacttggaggtgagttatgttttcggagttgacgactgcaccgacgcggttcgagacgtagcgtgagacggttgtcacgccaagaccggcttccacttgtgacttccactcgtctacgccgtttagttggctgagggttgagtggctgcctggaacgagtgtctcaattgtgtagacgtcggaggggtgcgagacggctaggttcggggttgggaggggcttggcggcttgcacttcggcttgcatggcgagggccttggcgaggccggaggctgtgtttgcgggcagcgaggagatgagggctgcgccggcttgggggacggcgccggtgggggcgttggagagctgggcgttctcggccatggattgcacggccttgcgggattgtttggttccgaaggtgtttgttagagctgtgcgttgggcgcgcatagtgttctggtgctggttgttagttggatgccgttgatgtacggacttgcggatcgaagggcataccatctcttcatctgagtcgtcctcgggcttgcggcttctcactgctcctcgcagtgtcgctcgccgcacctccacgactttccatgtcttgcgctctgggtctataactgcgacatagtgcttcacttgggagtcggtatcatctcctgtgccctcacggccgacaaagtccaacttagggtggtctgaggactggagcagtatctctgaagagacaatgcccgggttccgagtcgatgccgcagacttggagacattggcgcggtttttgatatatggattccagtggagggatttcgagctttgaagaccaggtgtgtcgactgtaacgcaagaattcgattagcgatggtttacagcctggatgaaagccttcgactcaccaattaccggtgccagctcgctcttatcttcaacaacgctggcggccagcgggggcagctgctgcagcgcgggctttttgcttgggcgatcattgcctgatgaacgcttccgcttgtgatctgttttattggacggcattatggcgttaaagacgagagacaaagattgtagctctcgagaatcggctctagcgcggtgaaataaaatgtctggacttgtcgggcagaaatttttacgagtggagacctggcaggcggtgagtctacggcttaccgcacacaaaggaatattgacgtagatggagcgatcgcgacggcgatataaagagagctacgaatatttgagaacagctgctcgagaagtagccgagctccagtttatgtttacatctacaatgagtaagaaaggttgcactcatcaagtcatcgattcatctgcagtagctaaaccaagacctccgagctattccatggattttgataaactcccggaaaaaacctctccacaacttttgaccagcccgaagaaaggccgtaaagataatgagaattgaccagtcaccccaatgccgtgctcaaagaccgatggtttgcaccggccctccaacatccacctaaacacaggagcccctccgggtaataaccatgcatgacatcagatcgtagacgtgaatgaatccgaggtgttggaatgtgggtagactgttgttgtaacagcggattccatcaattcgatctgcgatttcgtcttgaagataggccggaaatcgtatccgtgcaggtaactcgttggaatgaggggcgtgtcgcgaagaaacgaaagtcgcaatcgcgtcgtcagttgtcgtgttcagcgttcaaacatgagctcgagcaaagagggctgagatggagggggcgagtagtttatttgctggtttggggattagcatattggttcggcgatcggaagctcaatggccttcacaagaccatcggcgcataatggaatgacttacgatctggcacgcatctttctgcgcttgcgcttgagacgacgtgtgcgcttctttctccacttagctctcatcttcaaactgttgactggttagtgcattgcgctcgaggaaaccttaagcttcaggaaagctacttacgatttcgaggatgaaacagagatagtagaaagaaagatgaagtgtgggcggcccgagacgcatttacgtatggtgcggctgactcagctgcgctcgcttaggtcacacacgtgacacttcaagcttccatctgtgacgacacatgactatgcccgattaggaaatttgatagggtttccctccatagaagagtttaagattacagaccatttgaaaataattgatgtcatacgaagcacgagtgagggttttacgatgggacaattaaaaattcacgagaagagcaatgccattactattattgaatagtatatcaagtaaccatcatatagctccgaaatcaagacttttgatgcgaatgtttcccaattatagccaaccgtatgttcgttaaagaaatataccagaatcgtcatcactcatggagtttgcaagatccgcacggcgagatccacaaaattaaaatgagaaaatgtccgccatacgaaagtagctatccaaactggatattttctcagtacgtgtaccgatatgtgggcgccaagtcgccgagatattcctcttcgtcgtcgggaatcgtagcaggatcaaccgcggcacggtcacgttttctgttctcataccacagggatgccatgtagctcgtgcatgccagagctgcgaggcaaatgaatgagaggcatatgatatacccggttcggaaatccgtgacaccattctttacaacaaaagaaaaagtagcgatgattccaccgatgttgccgaagccaacctgccatgcggttcccacgctgcgtcgatgatgaccacccaaattcatggcaaaccagcatacaatgaccggcatggcgctgtaacagccagaggtgagcaggaacagagcgccatattgcgcatgagtattgttgtggattgtcatgagcataataaatccgacaagggcgatcgccattggaatcaaggtgaaagcgaatcggtgtcgcattcggtcagagcaaaaggcgactatcattgagaagccgaatgctgcagcccagggaggaatggagtacagttgtgttttgatcgaactatagccgtaggtctggataatcgacggcgcgaagtatgcatatcctgtatgagagtgagcaataattcgcttaacggaagatggaaatgttttacgtaccgtaagccgggacaatcaaaccgaagtacatgaatcctccgataaagaccttgtctgggaaaagtcagtgcactgcaaatgaatgcaacagggattctcgggctatacttacagtctttgaacacaccgaggacctcacgcttgcccaagtgaacgttgtgagcagccttgccgacatccttggccaacttggcacgcatgtatgtgcgctcttcctcattcagccacttgacatcctcggggaaatcagcaatgaaaaagaacaggatgatcgcgaccacactggtcaagacgccctcgataatgaacacccagcgccagccactgtagccacgcatgccgtccatctttgcaattccactggcaagcagaccaccgaaggcgccggccagggaagtggagctgaagaagaaactgaaacgcttttgagcctcagagcgtgtgtaccacatgcccaacaaatagaagcctggcgatcacaattagcacctgtcttaggatgtactgttggtatttgctcttacatccagggaacatgcccgtctcaaagacacccaaaaagaaccgagtggccatcagtccaccccagttctttaccagaccctggaagagcaaggtcaagccaaacatgaacatgcatgccgacactaattccgaattagcaagtcgccctcaccaattgcccctaaaccaagggcgcaaagggaccaaaacacttacgccagacatggggcttcaacttcttgagcaagatgtttgacggaatctcaaagataatatacggaacgaagaaaattgtgagcgcggtgttatatttcgttccatcgacgatgtccaaatccttcttgagtccgagaatagcagcattgctaatattaactctgcaggtcgatgatgtcagatataagcaacacctggtcacacagatacacaatggtcagcttaccgatccaaaaaggcaagcagatacaaaatgcacagacagggtaggatgtgccaatcgaccttggcttgcaacttgcgcgcggtggtagtcgtgagaggaggcagatcgccgtccgtgtgggagctgacctgactttcggccgcgtcgatgtgctctttgctatagcggggtgattctgcgcggggggagtaccttacggtcagcatgtgttgacaaggatgtgctagcgcaagcgcgaattggccaaaccctaacaaggacggggtatatgtataggattgaacatacctgtgacacccattgtgagatgcgaatcgcactaggacactgcgcgcctgcttggaaggacaataataatggggatgatggaagggaaaagggaaattttgacttttaaggctcgaattcccaagcgcagctcgccaatgcagggatgttaccgaggtgctacgctcgatgccgagtctcaaacgtggggtaacttccggagttacggagaggaaaagcaaagctgaaaaagcgagtggtcaatcctggcgacttaaaaagattcgagtcacagggcgaatcatccctggagatatccccggacgatcgaggccccgatctcggcgccgatatgcattccgcgattttagtttttttagtttctttagtttattaaattttcactttgcacttctagttccttattgattcggcagaacctcgggaggagacaggtgtatatagctttcatctttcaaatcttaattcgcccttcccacggaggactacatgcttagaattcaatcagtcgtttccccgcaaaatggcttcaagatcacgtgattcatgaacaggggtacaccactttaaatgtgaatatccacttagccaccctgggaagtgcgggggggtttggtatttttgtatctgctgacagtgactcagaaaaagtgttgactcatatttttattgctttctgatacggatatactggccgttgtttccaaatttcgactagtagagaatcgaattgctagtactccgtacaacaattaccagtacggagtagaatatcaaccgaggtgttgacctttttgcggtgtgactgtatgagttggcgtattgtattgtaacggcggaccaatgaattctctgtgaattgcctttttcaggttagctttaccgcttccggtttagcggctcaataccgtacccttcgatcaaatgaccttgcccagtctctttttcttctccaagggcatcctgtagcatttcacgagatgcatgctgctcctgcatgctgctccgttcacaaatccaatacatcatgtcaagtaagccttctctgggcctagccactccgagtgctagcttatatacacttgaattactatcaaccagccccagccaaaaacagaattcgaaatccccaaggtcctcccatagtagtctcatgtccctctcaattcgtcggtgtatttgatagcacgtgcatatgttccatattgaatccaagctccatgggcttacccgaaataagtaggcgaaggagtccgcttctccaagtcttggcagaaatacttttccgaagagaaaggctcagaggagtggtcccgatccacactgtaattgccgtcactattgattatctcgcagttagtccacaattggccctcgaggttggaggctgcttcgtggttgtgtgctttgctgattggttccttaagtaacgcctccgtatgtgtgatcaattccgtaagcgtgcgatattggttgtgccagcacttgtcgatgatatcgtcaatcagcggatcatgatcgagcttcggaaaatttcatgtcctggagtaagtccatgaccttgggtccatactcgtaaggatcatcgccaagacattgattgccataaacctcaaatccatagttgatcaaatagtatagcgaaccgagggcgaactgctctgttcgagaacctagaaagccggcagttcctgccattccttggtctgcttcgttactattaattagtcttcctcacggacaagggcaagtttcgaaatctgttgcaaactcggctgtgcaatcaaaatccgacagtttagtcggttacgatcaagtaggatgttctctggtcgcaagtcaccatgagcgaggttaagcgatgcgagaaaagcaacactttgagcaagatcgttcatccctgggtgcataagagatcagtgccttgtaaagtgtatagaggaaacactgcactatggagggacatggtggatgccgggatataatcttgtagattttgagttctttgcgaaattgctctctctcttcctcgccggacttaggaaccttgaccacgattagaggatgagcctcatagacgaaggagagatgcctcctccccagatccagtgcacactagaaaatcgacgttggatatccctaacaagaaggacaagaaaatatacaaatccgtgtctactcggaggagaagtgagaaacgggaaggagacagggggcaatcagccacgtgatcgaggccttcttccttagcgagctgtaggaatcgaccgacatcttttctctttcacttattagcccccatttccgaatttgtcgagaagtacctatgcagtgaagacggaaagcccaaaggtggtttataagcgggcagacagaggatttaagaaatacctaacacgccctgggaagtaggagaaaggtatgattcacaaaagtacaacgtagtcctggtagaggcgaataagtgcgtgcgatgtgaattccaacagggatatccttgtatggcgctggaggatcgacgcgaagtgggcctttttcaaacaaagagaatcaggccgcaaagtggtttatatttttaagggagattggagacaacgtcgaggctttgatgctgaaatgtgtcaaaggctgcataaaacccaggggctctagtcatatactcaatccttggcctgatacagttttccttttgtttgctattttgatttctcctttcccttttccctttctcttttacccttgccatattccatgacagtcacttccaacatacaatctttaagcttgctctctatgttatttctctgtatgagttagcagtgacttattccaatcttcctcgaaccacccttcaactcccgctttcttttgcggtttccctcactaccactaccatcatgagcctcagaagaatcaaggtgcaggcatctagatactttactcgtcgtggatcttgtatattatttgttatcctgatatggttcctcttttatcatcttccagctccgccttccacccagaacaatacccgggcagaccgaccacccccagagcatcgagtagaggacacggcccgatttatctaccgctctccctttcgaaacgatccgaatgttcaatacgaacaacagctatcaaatgcgctggaagagattgaaaaagccgtattgacacaaagtgaggaaagcaacatatccaaagatagaatctggcagatagcgaaaagtcaaaaggataggggggaagactcaatagtatttaaagggaaaaataaggactggatatacacagtaagtactttggccggatccttgctcgactttgactgaaaccacaaagttagtcactgataaaaaggccgtcgagtttttgaccaacgagctgtccgccatccccgaaatcgcaaccatatacaaatcctaccctcaaaatatcctccgagcagacctcctcagatacctccttctctggtactacggaggcttctacgcagacatcgatgtcttccccgctcggagcatcaaagcatgcccagcactagagcctttcttcgcacttacaccagacggatacacaaaaagtacccatcccgatatatcgctcgtagttggaatcgaggtcgacgagccatacgcttcaccggaattcatgcgcgactggcactggacaaggagctacggactgatccagtatacgatgtatgccccacgacgcttcagcccgcttctccgcgaaaccatcgtgcgggtcctggcacatactaggcaatacaatggagaacataccagcttcttccccagtctggcgtatgacgagaagactatattaggagtcacggggcctgatgtcttcacggatgcgattcttgacacactttcctcctcgcttccttcgactcatccgttcattcaaaaatctgtcgacgcagatgcagatataggggatctaatctctgctgagactggggagctggagaaacgggtaacgtgggctccgtttcatagactccgtgaccctgtatgcattcaggctggtgaggctgtcccgaatgaatccatgggtggattgtgtgtgttgccaatcagtgtttgggggaatgggcagagacatagtgaggcgggagggtttaatcatcctgacgcatgtgtcaatcatcggtttgggcgaacgtggaaaaaagggtggtgggagtatatatttgggtgaagctttcattatttaatctaggctcgatagtggaatacgaatctttggcatagattgattgaaatcactcctctctagaaatggaagtttataaatttatttaatgtactagtggatgatagtagatgagactatacagcatgaatcaattgagtatgagtgtattgaaaagcgaagattattgacaggagaggaaagaactatatgagtcctttactgccagtagagaaaccaagcagcactaagctgagcgaaggcgaaaccccgatttgccgagttcgtgcttgatccactcaaatgatcatttatagcactggcagccttccttcttggggttctggcaacgagcctggttgacagaacaaccaccacagaacgcacatgtatcgggagcatagcagttaccctcgcctacaacacagcttccatggtggcccacacatttggtgcacgcattggttgctcggccctcaagatctctcgcctaaaatgaacatgttaaaaaatgaccttgtttcacaatgggggttagtcggtaatgtacctggactaagctttgctgtatggagttagttaccacatatagtaggttcaaaggataaagactcactggctctccgtagatgatatcctcgccagattggtaaacttcgagctcgacgccatttgcggcaaaaatgccactctgtgtggccgatgcattggcaataagaagggccaggattgcagtgccttggacaaatagtttcattttggaaaggaattgacagttctgagcgctagaagggtgtattggccttcaggtattaattggagttagatttgaccgaccaaggttgatgaccacccgcagacttttatatcttgaatttagtgattcaaaatatgtggtcttctactataatgctggcaaggtcaatatgcaatccttcagttcagattactagcaataatcctcgagttttacgtatatgtcagccttggcgatactgagggtagagttggcattggtagataccagtagacacagatcttcagattctaaagtgaacggacggctatcttgggatcatcaagtagtaagcccacctgagtgctcggtaggctttttgcttttttgaaatgtatattttgtatttccttggccatgctctacatggcaccctacctattttctgctctcttcgactaaatgattttgattgatcccgggtgtcccgaggtctgaatcgtaattgagattgggctgggccttgcgctgcaagttcccattagacccctttgaatgactgatacctgacttgtagagatatttggaactttcaagaccatacggagtatacaactcaaggattaaatacccataacacgaaattatctatagcataaagaattcgaaagaaaagcatgtttttcttcccgtgaatcggggatcggggaagctgcctgcagccgtgtggtggaatcacattgtcgaaaagaaaagtcatagccgtcttatacgagtgatctgcaaaaaaagcaacggactctatgagtcagatctttgaatgcatcaataccagccatggagataacacaaacaacggacacctgcatatgtgatgcccagatgtagtgagagaattatacatggcagctgcactgccgatccatatgaaattgatagggaatcccaaaaaagtacacttacccgattgagagagctcaaataatgtaacagcttgcaaagagctttattccactgctatgacctcgatctttattctttattaccgatcatgggaataaaacagtagtttgcggcggcgcaaatggaaggatctatttatagagatcttccaagttctacatgttttctgtaaaatagatctaagaaaaagatcgacaaaagctatggagattcgtgtgagatcagcttacgtccagggctgctggggtccgtatgcattcaatggtagctctgcacggccgcgcaaggctggatgttatcataatctgagggattgtcggcttattccggcgtggactgcatggccattttgggacaaaagcaaagtcgaataggtcgcatggtcagtctaaattatctacagagtactctgtagcttgcggctaataataagaagaagaagaagaaaccctcgggaatgagattgggaacaatgtgagggggttgaccgcctgtgacggtctcattgcactcactacgcatgcgctacgagattgatatctcctagcttgaagtgaatccataatattcagtctatcttgagtgggaggaactggatagctcgtgttgatcgaagatgcaagtatgtgatcacagctaattcttgaatattctcgcatcccagtcacaatcatctcactcaggccgcgggaagcacccaggttgtcacagactggctcggaacattgccactccactcctggccactgttagtggacaaaagaatataaatatcgttactgaacgtgttctcaataacaacagtacgagttccatccgggttcagcgaagcaacggattgcacaccacctccattggaatatgtgtagctcccggtaccacttagcacaatggcacccggcggcatgaacttgctgaactgagccatcatgtagtatgccgggttgaaagtatatccgccgttggcaatggttaccagaccttgacaggttgcacagccgccactcgacagatgaggaccatcttgatcatttgtgccaagtgtccaggcagtgacgcccgatgcccaattctgcaaaggccccatggtgaaatcggcggcttggttccatgctgcggacgcgggagtccagcattctgtcatatattgattgacgttgggttttgtctcgtggaattgggtaaggactgtccagtctacgttgctggcataacagtgccatgcaactccgtggacatactggctagccccattgatgacagtctgaggataggatggaacatctagtgtctatgcgttagtaaatagaatcctccctcaaagatcccgtattgtcaagtacataccagtgttgtgatcatatgcccagatatcggtgctcaggccggcttgagcgagagccggtccgacataattttgaatcaactgtgcagactcatagtcaaacacatacattgtaggatatccagcttggctgttcagaggctcgttttgaatggtaatcgcatcgatgtgggcgccgagattcgcgtaagcctggatgtacttgacaaagtactgcgcaaaggcactagcatacccagtactcccagtgcctccactggtcaagtagccatcattgaggttattgttattcgtggcgccatcgatcacaccgttcagcttcatccacccgggggcactccaaggcgaaccaagagttttcaaattcgactgaagagacttcatcttagccagcatcgtagccatggcgcttccacggtcgcccaggttaaaaccggacatagatgggtctgcattattcccattatcatcataggtatacgcagggtcaccagacaggtcggaagcgccaatggtatggcgcatcaaggcgaatccagcaccggcaccggtcatcagctcattaagcagttgttcaagtgtggaactggacaaggtgttgaaggaggtaactgtggcatcggtgacggctgctccgaagcccacgattgtttgtttgtgtccgctggatgtatcgtcgacggtcagctgccaggtcgattcggagcctggactgccgctgccttgaacgggtgcggagattgacgagagcttgtaattgccatttgagtttgaacagtaggctgatgcagtggtggctcgctttccgggtgacgcctctgctagcaccgaaagcaggagcagaggaagaaaagatggaagcatgttgtatactggtccccaagagaattttagggaaagccagtctcagtctttcgagggatagaggtgggaattgatgatcatcaggtataggcatgcattgtctttatatatacctatcaaagacaatattgtccaggctgtacccgtccatttccctaaaagagcaatgcgactaatcggccgaggggaaagtacgctgaaacgcctaagaccctgaatttcgctcaatttcggcataagctgatgaagaatactacagtatcaccgactaatgcacgccacatttcaccgacgggtccccgatagcttgtattgtcttggctatctcggggaaattgctaattcgagggtagttgcttccaggttagttgcttggaatacctttccccgcattctcgacggctttttcaatgccattgtgccacggagtattgaataatgggttgcctcaacggtcatgttgcttattcggggtggggttgcccggaagcggcatgaaacaataggatggggcgttgtataagcggtgattaccggaatgagaggggcgaggtgacagccacaaggcaacttgggaagttgtaatcaaagcagaagtaagaagtagtgtaagaagtagtgtataagtcgtaggaaacacttcctttgctgtccaatacttaacaaagagcaaaggggtcaaaacgagaacatttagtacagacgtctcaattaaccaagataaatatagctctccaattttgatgctattcacaatcgtactagtcgaaataatgaggtcgatcagggaagacttggcttaggggagatcaccatccctaaaaggcagccacgtgcagggccacggctaggacgggagaaccattccatgagaacgtgcaatgaattcgaagcatctagagccacgagtggaacttgtaagtggaacttcggtgatgttgaggaatgcaggttgtgtggtgctgaaaacaggtcacgtctgcagatactccgtgttgatgacgtcaacattctgcgaacaggccactcaagtcctaatcgtatatgtaacccctcctccgaatgattttactccttcaaacttctactactagaaataacctgcataatcaatctacatcatgagcggcaataaattccccgtcgatctcaagctgttcaagcaactgaagcttgacccgaagaccgcacagctatcagcccagcaaaagagcgacttgctacacaacatcaacattttcagagatgccatcattgcctttacagcgacgggcgctgcccgtggagtttcgggccacactggaggtcccttcgatacagcaccagaagtctgcattttgcttgctttcataaacgcgaaccccagcaaatgggtcgacgctctgtatgacgaggctggccaccgtgtcgccacacaatacttgctggccgccctggacggcaagattgagcctgatcacctgctggaatatcgtgctgctggctcccaccttcccggccaccccgagctcggtctcacccccggcatcaagtttagctccggtcgtctgggccacatgtggggtatggtcaacggcattgctatggccaaccaggataaaaacgtgattctgttgggctctgatggatcccagcaagaaggaaacgatgatgaggcagcacgcattgccgtggctaaaaatctgaacgtgaagctcttcatcgataacaacgatgtcacaattgctggacacccttcggattacctcaagggctttgatgttgctgggaaccttaagggacatggcttgaaggtccttagcgcccagggcgagaatatcgacgccctatatggcgctatgtgcgaagtcatcaaccatgacggacccgccgctgttgttgtcaaccgcaagatggctcctggaattgaggaaattgagggacaatgcaaggcgcacgatgttattcccgtcgacattgctcgcaaatacctcactgggcgcggctatagccaggagcagcttgctttctatgataatatcaagcctggctcaaacccccacacgtacaagggttcgaccaaagacaagggctcgaaccgcaacattttcggcgaagccgtgaatgatattcttgacaaattgagcaaggaggaggctaagcgtcgtgtcatggttattgactccgacttggcaggctccaccggcctgaaggctatcagcgccaagcaccccgaatcctttatcgcatctggtgtcatggagcgcggcaatttctctgctgccgctggctttgggttccgcagcaatggagagagacaaggtgtcttctctaccttctctgccttcctggagatgtgcatctccgagatcaccatggctcgcctgaacgactgcaccgtcctgtcgcacttctctcacagcggtgtcgacgagatggccgacaacacctgccacttcggtctgaaccacttcttcgccgataatggtctgatggatgccgagactaccaccctgtacttccctgccgatggcgagcagatgaaggccgtagtcaatgaggtcttctggaacaagggcctgcgcttcatcttctccactcgttccaaggtcccttacatcttgaaggagggcaccgaccagaagctctttggagagggctacaagttcgttcctggcaaggaagaagtcattcgcaagggctccgctggttacatcgtctcatacggtgatatgctctaccgctcgcttgatgccgtcgagaacctgcgtgcggagggccttgacgttggtctgattaacaagccaactctcaacattgtcgatgaggagaccatcaagttgtatggctcctcgccattcgtcctggttgttgagtcgattgcgcagaagactggtctcggctctcgcctgggtacccaactccttgagcgcaatttgacccccaagtttaagtctctgggtgctaacaaggagggctgcggtggtctgtaccagcaagtcaatgctcagggccttggaccagagcatatcatcgctgcggtcaagcaggtggctggaaaataaatgtgtgaatgtctaacgtaacgactttttcatgaaataataaaaaacccttttccatttgtcttttgttcatatcttacccatttcttctccttatcacagccaagacttcagcgccaagacctcaggacccctaaatcccgcccgtcgttccaatcagatatcgcggcagttgaagcgacatttggcttcggcactttccactgcattctccataattatcctcccgccgtactgctgattggctgaactctgcatagttttgacttggcagccaggactactcccaaaaagcactagatcgcaggacttgaaaagcacgcaatcgtgctaaaagacgaagtagggctaatgcgatattaggtcttctagatcgatattgatttcttcagggtagagaaaatccatatatagcgcatttccccttttttgtttagcgcctaagttagaattttatcttcgtggcttgaatcaacgtgcttgctatcctttaagcccaaaccatataatggccgaacgaggttctatctcggcatcgtccggtacgccatttgaaaagcgagtatggtatcgcggaacactcttcaatgcctgtattatcggggccgtcggattcacagccccgggcttgtggaatgccatgaatgctttgggtgctggtggcgcgcaggagcctttcttgattaatgccgccaatgcgcttgttttcggtcttagtatgtgatatgttgctgtaatcgcattggatttgaatcgggcttctcgctaacttgatttgcttgctagtgggcattttgtgtctgttcggtggcccaattgccaaccggattggcctgagatggactctgatgcttggtgctgtgggatatccgctgtattcgtatgtatcatgagaacaaggtgtgaaattgtgttatttgaagactgactttatatacagtgccgccttatacacaaataaccgttttgtgagttcttcgtcaacttgtacaacccaggaaagaagactaattcccatgtagggaaatgtatggtttgtgctggttggatcagtattttgtggtttatcgtgagtatcctatactgatcaaagaaataatatcgttgactaacatttatagcgctggtcttttctgggcttctgagggtgctgtggcactaggttatcccgagcctgcaaagcgaggccgatacatgaagtgagatatttcaaaaagtcctacagtgacaaaaagactgacttaaaaagcatctggctttggttccgtacaggtggccctatactgggaggtgctattgtccttggtctcaaccagtatgttaattccaatttgaattcacatcacggacataatttactgacgattggaaagtgctgccgatgcccatgcaaaaggaaaagttggatctggtaggtctattcaagctagattgaacaaaccgattgctaacacacgacagagacgtatctcatcttcgtcgccctccaatgtactgccgttcctatagccttcttcctcacgtcacctgacaaggtccaacgcaccgacggaagcaaagtcaggattatcctgcaggactcgtggcgtgatgaaatgaaagagctctggaaggtctgccagcggagagaggtatgtttaagatcattggttccatcgtgcctatgtgctatatgtgactgacattcctagattcttttgctattgcctgttttctgggccgcatacttcaatatgtataccggaagtatgtatcgtgtgtttgctcttatatgcaattgctgataacttggtccagatttcaaaacgtactactttggcgtgcgcgctcgcgcgctgattggattcgtcagtatgtttacacactcacaatatttggacacacttttgcatcagtgctaacatggaaaaaagcctacttcgccactcttcttgcatcaacgatcattagtagattcctggactaccgtggcctttctatcagaaacagaatcaagtacaggtacaaaatcacaccatccaaaattgaacttaggagcaaaattaacaagccacagctttttctacgtaattgtcgtccacatcgctgcctgggtctactgctgggttatccaagagaagtacactaggaacccaccaacacttgattgggccgacaaaggtttcgttgaaggattcttcgttatcctgctctggggtgagtcttatagattgatcaacatcccacatagcgctaacctatttcatcagaattcgctcagcaatcgctgcagaacttcctctactaccttctatccaccatgaccgacaatatctccgaactctgtaagtcgaaaattcaaaccgatcgtcctatctccagattactaataccatatagcccgcttgtccggtatcctccgtggccaagagagcttttcacaggctgtttcttacggcctcaactcgaagaaatggcatggtggaagagtgccacttatcgttaacactatccttctcggtaagtgatacacattgactggttataaagaagtagtgctaacttttatttacagttcttgcggtgtggcctacttggctcgttatcagggtccacgttcccatcgagcattccaaggagacttctgagttgccccaagcccaagacgaggagcagaacaacgttagtctctctgacaaggagacatttcatgttgccgaagcagttgcttcgaaataaaaagttggagttgttgaatgtccttgaaaaaagtacttaatctatttacgacacggggttgacgtctacacaaaagttccctcacacaaaatctattccatgaatcaatgagaagcctatacataatctgtgaataatcatctgttctttactcctctttcaaactgcgagaacaccctcaccattctggctttcctcgcgtaatttccgctctgcacggctctcactagtgggatcaagataggcttccgtataaggttagcacaagatgcagaattgaaaaccacaatctcttgacatgagtactcacgtatttcaccaaaaacggtggtccggataccttgtctagctcctttgtatgtaccagggataacccgatgaagggtacacctaagagatcgtcagttcccaagtccaaagccacaaagtgaacagtgcatagttaccgattatcccacattgcaacactgccaacagcccatttccaacgaacagagtgatcatcggccgagtggatatgatatgccaagaaatcaagaaccttgtctagaaaggcatcagccctaaaccacaaactgattcgttcagtatttcactcaccggattccactttcttaagctcagcaaatccagtcacaaatccaggattgacgttcaatgccttcagcttagtgactgggtgcgtgcgcacggctgggtggtgtgtatcgattggagggcgattgggacctgcaccccatagatcgatgatggtatcatctatttagttaatatgtaagcaggtttactactatggttatgaaggagacaaacactgcagccttgaggtatgcacggcgtgaaggccatctaggaaccttttgtacgcgttgcttagggcatcgtataagccatattgagatacctatgaaatcaacattttgtctcgaatgcggcctgtatctgtaacatacccaagctgtgtcgccaccaacttcgggatgttcttccattctcagtagggagtaggtaggtgctatgatgtgttaaagattaacagccagaaaatatggttcaccacatacgattgatctcgaatgatgtatcagcgtggaaatctccactcggctacagaagtagaaattgctgttagaattttggtttaagcattttcaagatatcttacccaaggcgtgtagcttaggatttcacggtgatcctcgcggctacctttgatattcacgaactttgtgctgggttagcaatgatgacaaaatgccatgaagtggttatggaacttcatactttttgatcctgataattgtcagctcacttgaatctgccttggaatccagaaaacttcatgttttagcttaccttttgagcagggtgtttatccaagatacctgcaagataaaattattaatccgatgccgccattcggaaatccatatggccttaccataatgctgaaacagttctacctggcgctcagtagtaagatcctgatcccgaaagaagacaactccccgctcattaacgagaagcgccaattcatccagctgagtctcattcagctgagacaattgcacatcctcgaggacagttccaatagactcagtcaagtcaaccggcttcgccacagagaatagtgccttcttctccggatctgcaaagaatgctcggtctttgggcggggtaaatggctcacggggtggttctggaggcacatgattcttgatcttctcgttgaaatgaggatggagtgtaatggggaatcccgaatcggcggaaatatgcttgcgggcttcgagattggccatattctgtgagctcagttgcaatgatgcgtgtaaacaagtaaaaggattataatctgggtgaagtggaagtagatttacttatttcgtgctttataatctgttgagctcatattcggcttggattgcgtcaaaacgctactagtcgatatgttcgagtccaatcggctatgtatttccctaatatggtgtattgttagattctatgtcgaatatgtggagagtacgcacgcaatgtagtctttataaattccgtagtggaatttccaacgttgctataataatacaggtgcatattgggatcacgtggtaccgatggagtatatgcatcaagcgaagatactctccgaacagtaattcagacggtccaatataaaagtgaccaaactgttaatgaggcatatgaagtcctaattttgatccaaaaagggataagaattgtcaatgtgtggggtggtgcaagcaagtaaacaagcaagattccaataactataagtctagttatgttttggggattgttttgggacccccccccttggttgttgggacccccctttggctgatctctgcgtgtctgatcccttaggcatcagctatttctgccatttcttttaattttctgccatacttatttctgtaagtttgaattcttgtttacatagtaaaaaatgcaccattctgctcaaaattatgattatttctttgatttggtatgctttacaggaaacaactgtttcaatctgaaccgggtgctgtaaatatcacgtggaatgatagcagtgtcggggtcagcctcatgcaattcggccatgatctgacgagtagtacgacccaatcgaagcgcagtaacaatctgctctcttttattggtaagctctcgggttcgctgtacagcgtgcgttgaagcaggagatggttggtggttatgggacgggttctcgattgtgacatgccaaagacctgttccgtggtctcgccgcagagccatagagaaggggcattctaacgccatagtattggtattgattcgcttcttcggttgaggccgatgctcacatgcatctggcctccgaccacgatcacagataagccggactgtcttctttaccccccttttggtagtcttagaccggcggatcgtaaccgcatacccatgtgggcgtgcgaagtcgttgatagcatcctttgcttcatcggaggtcgcgtatgtacgatcggtgggcggtagcgccatcgtgatcgcgcatgtcggctgtgtagagggtggaagcggctgtatgagggaatcaggctctggctgggcgctgggcgggttggattgggtgtctggattgatatcgggatcggtattggactcggaatccgagtcctcaaggtaagcaagccccaaagaggccatatcgaaaagataaatgctcaaaacgtgaagacaacgcgaaagggatcaaagatggtggagacagggccattgaacttgaaatctaggcttggctttccagccatcagctttgcgccggtaaagtacggacggagcttacttttctgctaagaagatcccggcccgaaaggggtcccctccgacttactgtaacgcgtcacgtcacgcgtgagatcaagtgccagatcatgtgccaaggcggccaggaaagcggtgagtcttgatggtaggcggtcagttgatgcctgaactaggggggtcccgacaaccaatggaggggtccccgatacaatttccttttaggtattaggacttgtagtaaaggcctactgggtcgcgtggctacaaaagcctctcatgcttttcatatcaagaaaatcgaggtctaatatgaggagctcagaatccaaatttgccagtgctcaaatatcacatattcgatggcgcaaactggagatggctatctgtctggctattcgaggaccaccacatgtccatatatagtacaacatttcactccacttccccattctcaatctccaacatcatttcctccgctttccttgctaccgttctcgcttcgtctccaatatcgcccctcatcctcgctacctccccaaatctcttccgccatagcagccacctctccttgcaaaagccatgtttgccttcccagagagggcctccccttcccggcgccatacccggatagccgctaagatcttcatcccattcatagatctctacgccgagtgtactgatccatacagcagcagaaggaatcgcctctaaggggtgagttagttacaactggcctataggtatttctagcgcgtcgcggagggtgaacattgtaaaccataagtatgcgaatacaggttcctcgattatcatcaaaaatgctatgaatttatcccagttgatgattttcaaaattgcactttgtcggtgatcagggggtccaataggtacggatagattccactgctcacggagtgcccagcctagtgtcgggaggtctttccaaatttgcatatcgtagagaatgagtgcgtccccgctggctgttttcgggcttgggagcttagaaaattggactaggatctcgacgagcttatcatggtattcagaggattcgcaggcgcatcccactatcacagcccacagacgaccaagacctgcttcaggcttcattgataaagagatcgaagcgagattcctcacggcttcttgtgcagagatgctgtcgctgaaaaggtcctataggacagcgaattgagaagtaaacatttcatctgtgacgtctgtcattttgagaaatctcaatagtaatttacagatgaatgtcgtgagtggcatacaataatagatcaaatgcaacagtaaggctagacttggtgaaaaatgagatgattaaaccaagcgtgcctcgtccgtcgtttagcgtggtattaaatgacgcacagggattattccaagtagctatcgaactagtttgctgcgccagtttatatatccactatcttgatgttcatcctcatggatacgattatcatgggggctcgactgtctgtcgactagagctatatgagcggggttgaatttgtcgtgagacagtatggttcctatcttctagaggaatataagtcgattatacgtagtccataaagtagagtcccagaactgaggtgggtatgtgggattagcccaccgactctaaaagcggtcaacatgatcgtcctaattattagtgacggaaaaacggtggtaaggcgagtgtattttgtggcagaaaaatcttaataaattctctaactctctaaaactgacaatagtcctaaaacatgacaatctgatggacaacttagtaatcaaaacaaacaaaacaannnnnnnnnnnnnnnnnnnnnnnnnnnnnnnnnnnnnnnnnnnnnnnnnnnnnnnnnnnnnnnnnnnnnnnnnnnnnnnnnnnnnnnnnnnnnnnnnnnnnnnnnnnnnnnnnnnnnnnnnnnnnnnnnnnnnnnnnnnnnnnnnnnnnnnnnnnnnnnnnnnnnnnnnnnnnnnnnnnnnnnnnnnnnnnnnnnnnnnnnnnnnnnnnnnnnnnnnnnnnnnnnnnnnnnnnnnnnnnnnnnnnnnnnnnnnnnnnnnnnnnnnnnnnnnnnnnnnnnnnnnnnnnnnnnnnnnnnnnnnnnnnnnnnnnnnnnnnnnnnnnnnnnnnnnnnnnnnnnnnnnnnnnnnnnnnnnnnnnnnnnnnnnnnnnnnnnnnnnnnnnnnnnnnnnnnnnnnnnnnnnnnnnnnnnnnnnnnnnnnnnnnnnnnnnnnnnnnnnnnnnnnnnnnnnnnnnnnnnnnnnnnnnnnnnnnnnnnnnnnnnnnnnnnnnnnnnnnnnnnnnnnnnnnnnnnnnnnnnnnnnnnnnnnnnnnnnnnnnnnnnnnnnnnnnnnnnnnnnnnnnnnnnnnnnnnnnnnnnnnnnnnnnnnnnnnnnnnnnnnnnnnnnnnnnnnnnnnnnnnnnnnnnnnnnnnnnnnnnnnnnnnnnnnnnnnnnnnnnnnnnnnnnnnnnnnnnnnnnnnnnnnnnnnnnnnnnnnnnnnnnnnnnnnnnnnnnnnnnnnnnnnnnnnnnnnnnnnnnnnnnnnnnnnnnnnnnnnnnnnnnnnnnnnnnnnnnnnnnnnnnnnnnnnnnnnnnnnnnnnnnnnnnnnnnnnnnnnnnnnnnnnnnnnnnnnnnnnnnnnnnnnnnnnnnnnnnnnnnnnnnnnnnnnnnnnnnnnnnnnnnnnnnnnnnnnnnnnnnnnnnnnnnnnnnnnnnnnnnnnnnnnnnnnnnnnnnnnnnnnnnnnnnnnnnnnnnnnnnnnnnnnnnnnnnnnnnnnnnnnnnnnnnnnnnnnnnnnnnnnnnnnnnnnnnnnnnnnnnnnnnnnnnnnnnnnnnnnnnnnnnnnnnnnnnnnnnnnnnnnnnnnnnnnnnnnnnnnnnnnnnnnnnnnnnnnnnnnnnnnnnnnnnnnnnnnnnnnnnnnnnnnnnnnnnnnnnnnnnnnnnnnnnnnnnnnnnnnnnnnnnnnnnnnnnnnnnnnnnnnnnnnnnnnnnnnnnnnnnnnnnnnnnnnnnnnnnnnnnnnnnnnnnnnnnnnnnnnnnnnnnnnnnnnnnnnnnnnnnnnnnnnnnnnnnnnnnnnnnnnnnnnnnnnnnnnnnnnnnnnnnnnnnnnnnnnnnnnnnnnnnnnnnnnnnnnnnnnnnnnnnnnnnnnnnnnnnnnnnnnnnnnnnnnnnnnnnnnnnnnnnnnnnnnnnnnnnnnnnnnnnnnnnnnnnnnnnnnnnnnnnnnnnnnnnnnnnnnnnnnnnnnnnnnnnnnnnnnnnnnnnnnnnnnnnnnnnnnnnnnnnnnnnnnnnnnnnnnnnnnnnnnnnnnnnnnnnnnnnnnnnnnnnnnnnnnnnnnnnnnnnnnnnnnnnnnnnnnnnnnnnnnnnnnnnnnnnnnnnnnnnnnnnnnnnnnnnnnnnnnnnnnnnnnnnnnnnnnnnnnnnnnnnnnnnnnnnnnnnnnnnnnnnnnnnnnnnnnnnnnnnnnnnnnnnnnnnnnnnnnnnnnnnnnnnnnnnnnnnnnnnnnnnnnnnnnnnnnnnnnnnnnnnnnnnnnnnnnnnnnnnnnnnnnnnnnnnnnnnnnnnnnnnnnnnnnnnnnnnnnnnnnnnnnnnnnnnnnnnnnnnnnnnnnnnnnnnnnnnnnnnnnnnnnnnnnnnnnnnnnnnnnnnnnnnnnnnnnnnnnnnnnnnnnnnnnnnnnnnnnnnnnnnnnnnnnnnnnnnnnnnnnnnnnnnnnnnnnnnnnnnnnnnnnnnnnnnnnnnnnnnnnnnnnnnnnnnnnnnnnnnnnnnnnnnnnnnnnnnnnnnnnnnnnnnnnnnnnnnnnnnnnnnnnnnnnnnnnnnnnnnnnnnnnnnnnnnnnnnnnnnnnnnnnnnnnnnnnnnnnnnnnnnnnnnnnnnnnnnnnnnnnnnnnnnnnnnnnnnnnnnnnnnnnnnnnnnnnnnnnnnnnnnnnnnnnnnnnnnnnnnnnnnnnnnnnnnnnnnnnnnnnnnnnnnnnnnnnnnnnnnnnnnnnnnnnnnnnnnnnnnnnnnnnnnnnnnnnnnnnnnnnnnnnnnnnnnnnnnnnnnnnnnnnnnnnnnnnnnnnnnnnnnnnnnnnnnnnnnnnnnnnnnnnnnnnnnnnnnnnnnnnnnnnnnnnnnnnnnnnnnnnnnnnnnnnnnnnnnnnnnnnnnnnnnnnnnnnnnnnnnnnnnnnnnnnnnnnnnnnnnnnnnnnnnnnnnnnnnnnnnnnnnnnnnnnnnnnnnnnnnnnnnnnnnnnnnnnnnnnnnnnnnnnnnnnnnnnnnnnnnnnnnnnnnnnnnnnnnnnnnnnnnnnnnnnnnnnnnnnnnnnnnnnnnnnnnnnnnnnnnnnnnnnnnnnnnnnnnnnnnnnnnnnnnnnnnnnnnnnnnnnnnnnnnnnnnnnnnnnnnnnnnnnnnnnnnnnnnnnnnnnnnnnnnnnnnnnnnnnnnnnnnnnnnnnnnnnnnnnnnnnnnnnnnnnnnnnnnnnnnnnnnnnnnnnnnnnnnnnnnnnnnnnnnnnnnnnnnnnnnnnnnnnnnnnnnnnnnnnnnnnnnnnnnnnnnnnnnnnnnnnnnnnnnnnnnnnnnnnnnnnnnnnnnnnnnnnnnnnnnnnnnnnnnnnnnnnnnnnnnnnnnnnnnnnnnnnnnnnnnnnnnnnnnnnnnnnnnnnnnnnnnnnnnnnnnnnnnnnnnnnnnnnnnnnnnnnnnnnnnnnnnnnnnnnnnnnnnnnnnnnnnnnnnnnnnnnnnnnnnnnnnnnnnnnnnnnnnnnnnnnnnnnnnnnnnnnnnnnnnnnnnnnnnnnnnnnnnnnnnnnnnnnnnnnnnnnnnnnnnnnnnnnnnnnnnnnnnnnnnnnnnnnnnnnnnnnnnnnnnnnnnnnnnnnnnnnnnnnnnnnnnnnnnnnnnnnnnnnnnnnnnnnnnnnnnnnnnnnnnnnnnnnnnnnnnnnnnnnnnnnnnnnnnnnnnnnnnnnnnnnnnnnnnnnnnnnnnnnnnnnnnnnnnnnnnnnnnnnnnnnnnnnnnnnnnnnnnnnnnnnnnnnnnnnnnnnnnnnnnnnnnnnnnnnnnnnnnnnnnnnnnnnnnnnnnnnnnnnnnnnnnnnnnnnnnnnnnnnnnnnnnnnnnnnnnnnnnnnnnnnnnnnnnnnnnnnnnnnnnnnnnnnnnnnnnnnnnnnnnnnnnnnnnnnnnnnnnnnnnnnnnnnnnnnnnnnnnnnnnnnnnnnnnnnnnnnnnnnnnnnnnnnnnnnnnnnnnnnnnnnnnnnnnnnnnnnnnnnnnnnnnnnnnnnnnnnnnnnnnnnnnnnnnnnnnnnnnnnnnnnnnnnnnnnnnnnnnnnnnnnnnnnnnnnnnnnnnnnnnnnnnnnnnnnnnnnnnnnnnnnnnnnnnnnnnnnnnnnnnnnnnnnnnnnnnnnnnnnnnnnnnnnnnnnnnnnnnnnnnnnnnnnnnnnnnnnnnnnnnnnnnnnnnnnnnnnnnnnnnnnnnnnnnnnnnnnnnnnnnnnnnnnnnnnnnnnnnnnnnnnnnnnnnnnnnnnnnnnnnnnnnnnnnnnnnnnnnnnnnnnnnnnnnnnnnnnnnnnnnnnnnnnnnnnnnnnnnnnnnnnnnnnnnnnnnnnnnnnnnnnnnnnnnnnnnnnnnnnnnnnnnnnnnnnnnnnnnnnnnnnnnnnnnnnnnnnnnnnnnnnnnnnnnnnnnnnnnnnnnnnnnnnnnnnnnnnnnnnnnnnnnnnnnnnnnnnnnnnnnnnnnnnnnnnnnnnnnnnnnnnnnnnnnnnnnnnnnnnnnnnnnnnnnnnnnnnnnnnnnnnnnnnnnnnnnnnnnnnnnnnnnnnnnnnnnnnnnnnnnnnnnnnnnnnnnnnnnnnnnnnnnnnnnnnnnnnnnnnnnnnnnnnnnnnnnnnnnnnnnnnnnnnnnnnnnnnnnnnnnnnnnnnnnnnnnnnnnnnnnnnnnnnnnnnnnnnnnnnnnnnnnnnnnnnnnnnnnnnnnnnnnnnnnnnnnnnnnnnnnnnnnnnnnnnnnnnnnnnnnnnnnnnnnnnnnnnnnnnnnnnnnnnnnnnnnnnnnnnnnnnnnnnnnnnnnnnnnnnnnnnnnnnnnnnnnnnnnnnnnnnnnnnnnnnnnnnnnnnnnnnnnnnnnnnnnnnnnnnnnnnnnnnnnnnnnnnnnnnnnnnnnnnnnnnnnnnnnnnnnnnnnnnnnnnnnnnnnnnnnnnnnnnnnnnnnnnnnnnnnnnnnnnnnnnnnnnnnnnnnnnnnnnnnnnnnnnnnnnnnnnnnnnnnnnnnnnnnnnnnnnnnnnnnnnnnnnnnnnnnnnnnnnnnnnnnnnnnnnnnnnnnnnnnnnnnnnnnnnnnnnnnnnnnnnnnnnnnnnnnnnnnnnnnnnnnnnnnnnnnnnnnnnnnnnnnnnnnnnnnnnnnnnnnnnnnnnnnnnnnnnnnnnnnnnnnnnnnnnnnnnnnnnnnnnnnnnnnnnnnnnnnnnnnnnnnnnnnnnnnnnnnnnnnnnnnnnnnnnnnnnnnnnnnnnnnnnnnnnnnnnnnnnnnnnnnnnnnnnnnnnnnnnnnnnnnnnnnnnnnnnnnnnnnnnnnnnnnnnnnnnnnnnnnnnnnnnnnnnnnnnnnnnnnnnnnnnnnnnnnnnnnnnnnnnnnnnnnnnnnnnnnnnnnnnnnnnnnnnnnnnnnnnnnnnnnnnnnnnnnnnnnnnnnnnnnnnnnnnnnnnnnnnnnnnnnnnnnnnnnnnnnnnnnnnnnnnnnnnnnnnnnnnnnnnnnnnnnnnnnnnnnnnnnnnnnnnnnnnnnnnnnnnnnnnnnnnnnnnnnnnnnnnnnnnnnnnnnnnnnnnnnnnnnnnnnnnnnnnnnnnnnnnnnnnnnnnnnnnnnnnnnnnnnnnnnnnnnnnnnnnnnnnnnnnnnnnnnnnnnnnnnnnnnnnnnnnnnnnnnnnnnnnnnnnnnnnnnnnnnnnnnnnnnnnnnnnnnnnnnnnnnnnnnnnnnnnnnnnnnnnnnnnnnnnnnnnnnnnnnnnnnnnnnnnnnnnnnnnnnnnnnnnnnnnnnnnnnnnnnnnnnnnnnnnnnnnnnnnnnnnnnnnnnnnnnnnnnnnnnnnnnnnnnnnnnnnnnnnnnnnnnnnnnnnnnnnnnnnnnnnnnnnnnnnnnnnnnnnnnnnnnnnnnnnnnnnnnnnnnnnnnnnnnnnnnnnnnnnnnnnnnnnnnnnnnnnnnnnnnnnnnnnnnnnnnnnnnnnnnnnnnnnnnnnnnnnnnnnnnnnnnnnnnnnnnnnnnnnnnnnnnnnnnnnnnnnnnnnnnnnnnnnnnnnnnnnnnnnnnnnnnnnnnnnnnnnnnnnnnnnnnnnnnnnnnnnnnnnnnnnnnnnnnnnnnnnnnnnnnnnnnnnnnnnnnnnnnnnnnnnnnnnnnnnnnnnnnnnnnnnnnnnnnnnnnnnnnnnnnnnnnnnnnnnnnnnnnnnnnnnnnnnnnnnnnnnnnnnnnnnnnnnnnnnnnnnnnnnnnnnnnnnnnnnnnnnnnnnnnnnnnnnnnnnnnnnnnnnnnnnnnnnnnnnnnnnnnnnnnnnnnnnnnnnnnnnnnnnnnnnnnnnnnnnnnnnnnnnnnagtcacgtgatccaactgtatcagggatgaaaaatgacagtattcatcctagattctgacaattagtctattgtaggcctgccctctgtggagtttatccaaaaccacgcacaattgtacgttataattatcgtctcttagtaaggctgattaccaaacactatgagtactaggtacacagtcgttagatgtattcctgagaagagatctaaattgatgcatcggacataatcttgcttcaacagttatgagatgcaaactccaaattcgagccgtcatgacttggcatgggtatcatcagaagtatcgtcgttctttcctttgacagagagccactccagccccaatacaccgagaataccaaagcaagagagggcgacgctcacgtagaatgtctgatctagggccttgttgtaagcaagcaggacaacatcgtagagctccttaggcacttggctcttgaatttcgttgcgccggctgcaataatttcagtggcatcaacatccggagcatattgcgccatatttgttttcagctgatttgtgaacacattctgcgcaacggagacgaagaccgcactggtgagattctccgtgaatataacaacagcggtgccgatggggatatcctccaatgatagcgcagtttggggtgcggagaatgctgtctgtaaaccacacccaactcccgctccaagaatcacttgatatccaatccattctgcgtggccggagttgacgtctagcatggtgagcagaccggctccgattgccatgaaagccaccgcaatataggcccattgtacgtagtacccaaacaccgaagtaagaccgcccgtcacgaacgagaagagcacgtagctcagtacaagaggaagactcatgacaccggacttgattggggtggctcccttgatggcttggaaccaaatttgaatctgacgaacaagttagtatgctgtaatttagggtttatccaaccccacaaggagctatacacacgtaatagagtatgacgaaaaacgcagcgacgatgcatgagccgaacaaagatgagccccaaatattgcggttgtagaaaatcctcttggggacggttgcaagttcaccggaccgaagctgaacaaacccaaatgcgaccaaaatcacgaaggccactacaaacagagcaatgattcgcccgctggcccatgggtatttggtaccaccccattgcagggcaaggagcaaacaaatgataccaggaagtaaacagagggtaccgggaatatccatctgcctcagttgattgatgaagccgagtttacctgccttacttcctttgaaagaagaaacgaagaataaaatgaccagaccagcaacaaacccaagaggaaggttaatgtagaaacaccacctccaagtgagtttggcgttattggtgaaggcaccccctatcaaaggaccagcaatggcagaaaatccgtacatagcaccaagggccccaatcaacataggacgttggcgtggcggcaccgagtaggcgatcaataaaaacgaaccgtttgagacaccaccaccaccgattccggcaatagcacgccccacaatcagagcagtggatgtaggtgcaacaccacagatcaaagagcccagttcaaaaataaacagggaggccaagtagacccatttgacggtgtagaatgtgaaaagctttccccacatcagctggaatgaacatactgtgagcatgaaggcactcgcgtaccacccaacatcttctaatgcgttgaaatcatcggtgattttagggatggcgctggaaataattgtgttgtctagccccacaaggaacatgcagaggctcaagctgagagcgatgaggatgagcttggcctttccggggtactgaggttcgttctggttgctgagaggcccagaatcatcggttgacgttggtgtacgtttttcagtctgttgtatttgcagaggatctagaggatctgctgtagatggcggattggtgggtttgtcatgggggagcttcatggttggagaagaggtagaaatatacaaagacctgaaaagtgaacagatttgccggctttctcagatcgtcgcatattgaacaaggatatgaaaaggatattagacttttatattgaagcttccacgggttcctctagatccgtaaggggaatagtggatcacgccgaggcatgagtcatgttcactcattgtgacctcctggtgatcaaggcgctttggggaatgcatttggatagtttgttaatccctaataattgcaaaggcaatgtcagaattgggaaagcctggtagccgtcttaccatcccaccctgacattgatacctggaacaggtatgggggcggtaagacggctagtacctaacccagtgagacaatgttatgcagcaaacccatccaatacggtaggcggtcggcttctgccgaaaagtgaggttatatcggactttaaggatgctatttcgcccttcggggcatatggtcaaatgaaaatatacagagaagattagcatggcccctgcactaaggatgacacgctcaatcaaagagaagctacctatttttttctcttttacacgtcttttattaagcttatagggtggaggccttttttgcaatatatgattggtcctacgcaattgagaagtcacgtgtaaagccccatagccccacgtcgcaggtacgaaaccgaccaacggcgattgctgaatttattcccttccaacttcacagatctcattatcacgatgttaaagcaaacttcactttcagcctgtaggtgatatttccagtcgaacatagctgtaaatagagaaatgcaattctactaaacggtccgatctcgggaggtccacggactacggccggacccactcttccccgcggaatttcccacgactgatcttccaacagaaggccgaataagggtggattgaaggttgatgaagcgcattaaacgaggcaactagctggtaagagccaggcttcaagcaattgctccgtattatcctacgtttaggacaaaactcgacttcgccacacatctcaggctcagccgaggggaacttgccgcgggatttccctccacccgaaaagcattgacaaacaagatggaaagcggggacgagcgaccataccggtctcacacgaagccagcatgcgtaccgtgccggcggaggaaatcgcgatgcaaattggagccccacaccgcggcctgtctgatgtgtcgtgcacacggcacagagtgtacatttcccaacggcagaggaaagtcaacaccgcaaaagaggtattctacagaggatagcccaatacaaccgcacccgactttacgaactccagccgtagctgcccggccactgaaccggttaccgccaccagtagcgacttcgccgcagttctcgattgtcacacaggctcagaacgaacaggatacaccgctgtctcttgaagccgacgatgataatccccatatcctcggtccggcggtgactggggataatcatgtcttggctgactacctgtctaacatttcgggtggccaggggattcgtgagattcgtccagtcgagccgggtagttcctcatccccggttatattcaccaaggtgcagaaaaggccgttggggctcatggtgaactccagtccggcattgcataagttacaaaccatcgaaaagcttgtagagccatggggaccacacttgatagacatgtgagttagatgatgttggttagtattcgcgagaagtttggaaactaattgtccccagatatctgagaaagatcaatccctgcatcccactactcgaagaaagttcctttcgggcgcaatacacaaatgccagacatcgcatttctcctgcgcttttggcgtgcctgtatgcccacgtgcttacccaatggcaacatgacccccttttgtcacgagaaagatgtccagacattcgttttgtctggaatcttgctattgaagcgtcctattcggagttgcatgcctcagctggaatatcaacgataaaggccatcctcctcgatgttgggggtcgtccaaccacatctatgacaggcaacggagtaaggcttggttcggctgttgcgttgtgccattccctgggtttaaatcgaaacccccttccgtgggatatcccacaggaggagaagcacatgagaatgaagatctggtggtctatattactccatgatcgctggtatgttttcaagaacgaacctttcaaacagtgcaatatttcaggaactcatcatcaaacaggtcaagtctggcgtatggaacacctccccatatcaggagatcacaatacgatgtaccactaccaaaatctgagtacctgtcagattgggaacgagaccatgaagcaaacgcggttttcatcgagcttatgaatttgaccgatgtgctagatcactgtctggagcaggtgtatagcatccgaatagagacccaagcaccaagcaggaatctagaactagagttgaacaaatgggtggactcactcacaggagacatccgcaaaatcatcatccgtggctcaaacctaaatatacccggatcctctaatctccgtctggcatacctcgcaacaaggctcctcctccggcgcattgacctagatcgagagcggcaagcaccagactcgaatgcagagcacatggccaaccaaatcatggaagcgcgcaggacggcggaggacattgtggttctggtccaggaactcggagaagcccagctgggtgacttctggttacctgtcgtagcatttacattttcagcaacggtgacgtttttgattcggtgcgcactagagacagagcaggcagcgggtcttgcacagagtggttctctgcgaatggcgaatgaccttttggattcgttacgatcgcaccacaagaactttgggtgggatctaggtgatatctgtctcgcacagcattctgatgtcattgacaagctgttgaagtcagagccaccgcttgagaactcgggggagacaaatcttgatctccgtcagccttttatgcctgatatgactttcgttgatgatatgtttccaagtacttgggatatattgcagattatggagtgaatctaataaaaatatttgaacaacagctgcatattatattgagacccgcccaggaaaggttcagacagggaggcaatacggtctttatcgaccaagacgttcagaagagatcctgcagtagaatatgccgtgttcacgcgaggtagattcgacttcctgccaaccgggtgcgcgtgtattgatatcgagggggagacatcgtttggctgtgtcattgtggttatgggtgttgtgagtttcaagtcgataaggccgtgcctgaatccgctgtggcatagtggcagctcgagttgcgcagttgggcctcaacatcacggtatgtgcatttggcgtttggcacaattatagagtggtgtgctaattgaccccccaaaaagcggatttggaactctggcgtaaacaggagtcggaattcctgcgtcactgcagtctgcagcggtcatgtattgattgatatacgagcgaacttacatcatctgtgaatcactattgagcattttctcagaatggccgacgtctatgatgagatgcttgctatcctacaggacctattcagcgatagaatctctacgcaagaagccgtgagggatctcgcttcgaccaccttatcagtagaccctcctcaatacggtctttataatctttggagtgtgatagtaacatgtgcctgcgagtcctctggataccatgataagattgtcgagctcctagtccaactctccaagcttcccagcgaggatatactcattctctacgatatgcaaatttggaaagacctcccgacactaggctgggcactccgtgatcaccgacaaagtgtaatttcgaaaattatcaaccgggataaattcacagcacttttgatggcaaccgaagaacctgtattcgtatacttatggtttacaatgttcaccctccgcgacgcgctagaaatacctataggccagttattactaactcaccccttagaggcgattccttctgctgcgatatggatcagtactctcggcgtagggatctataaataggatacagatcttagcggctatccgggtatagcgccggggagaggaggccctctctggaaaggcaaacatggctttttcaaggagaggtggcagctatggcggaagagatttggggaggtcgctaggatgggcgagattggagacgaagcaagaaaggcagcaagggaagcagagcaaatgatgttggagattgagaacggggaaatagagtaacaaattgaatgtatagacataaaactgaccatatggacttcgagcttgaagtaaaagacatcattgtaagttcgaactgaaagataattactcatctggtgtccaggtctctgtataatatccttatcaaattgcacctattgcgaggaaccaggtcgatcttgatagaaaaaagagtgcactcaactaaatgactaacatggagaaagaaagaagaagcaagttgtaaagtggaagcagctagttgatatagctgaccatgcaaacgttgcaaacaaccaaccttctcgcttacctatctaacaaacaatctatggcgagcaagcaaatatgaagcatatgataatgacctatcttagatcgggacactagtaggagatttgccaagctaggatttgcatggtaagataaaccaaacccgaatgcatatagtggtactattgaatcttcctaaataaatctagcacgtaatagcgagctaaatggcgaaaagaaaaagcttggcaggtggaggtggcgacgtagatgtgccaagttgggttgactaaaacattcaacaccatgccatttcgcgcaatgatggttgttttgttattatcacgtcatgtacttgaggtcttgggaaaatattggtttcccccatggcagagaacttttagctgcaggtagttacatgctttttcccgatacactctcttcttttttctctttgtgtccaccaaaccacagaaatcctgcacatcagagattcaggcgattcgctcggacggacgactaagcgtcgggttgaaggagctacctcgaaaggattatgatccactaatcagagggttagaacggatcaggaacagattccgatgtgtcgcgatctgcgggatcataggccgatatacatgacccttcggatttcaagattggtccgacggaaccggcccggcctgctccacatggttccgcacgggcccttgcttagagttttgtgtctggcaaagatatacgattgatcttgctctttcacatcctctgtttgcttatcccttgtccaaccattgctactggagaaagtgaccgtaacctagagattatgataggaagtgtgtgactcggagtcttcgcaattgctaactatgagtggtctcgtattactcaaccccatttctagagccaagaaagagcgagataaatctaaattatggcgtgataacatttccaagtaccctcgaaacgatatataactactcattcagctcattcattccttcatgataagtgtctatttattcaaagacccaagtcgacggtgcacgcctctttccattgccaccaagaaacaagctacacgcacatatggatttggcctccaaggctgaggctacggccacggagagtctttcatctaataacgagagagccctcgagagcaaatatgccgatgaaactctgcgcattcttgagcttcatggagactctgttgggccattgacgcccgagaaggagaaaaagctgagacacaaattgtactggaatatcttcggactactctccgctatcaacctactgctatttgtgagctcattatacgatcatcttgttcacagcctctaacttctctagatagataaatccactctgggctacgccgctattctcggcctgttcgaagagactggtatcacgaaggctgaatacaacaatcttgggactttcttctacgtcggtacgtgacattattgtttctctcattgtaccttctctaacattcccataggttacattgttgcgcaatggccgggacattatgctatgcaaaaactaccatttggaaaatttgtcgctgctcttgtcttcatgtggggtgtcatcctactacttcattgcgttgccacaacgtattccgctcttgtggtcctccgactagcactcggtgccgctgagtctgtcgttgtacctgcaatggaagtcacaattggaatgttcttcaatcgttacgaacagtcgttcctccaaccctttctttggttgacgtcggcagccgcccccatatgtgccgcatttatctcctacgggttactttggagtcatagcgccgtcctgccatggaagctgtttatgattattactggggctgtctcggtacttctttcaattgttgtttggtttcattatccaaataatccagccgatgctaaattcctgtcactggaggaaaagattcacaccatcagacgggtacacgagtcaagtcaaagttctattgaacagaagcagttcaagaagagtcagtttatagagacgctccgcgaccctgtctcatggctattcgctctgcaggcctttaccctgatgatgtctaataatctcacctacgggcagcagaacctcattaccaaggctcttggggtggacagcctgggttcgacgctcgtggctgcagctggtggcggtttcggtgtcctggtctgtctcgcaggagcatatgccctgcgatggtggccttcaaatcttgccttccacggactcttctggtgtcttcctgcaattgcaggtggagttggaatggtcgcaattgactgggaccagaagttagggatgcttgcttgtctgctcttggctggccatacctatggtaatacctacattatcgcgttgggttggactacatcatcggcagccggctacacgaagaagctgacccgaaatgttatgttcatggctggttattccattgccaacatttgctcgccacaaatatgggttcctaaagacgcacctcggtattatggtgcctggatctccatgatagtggtcagttgggtgggcacaccgttgatccttttcattatacgcttcattttgaaacgcaggaacactcaacggaaggcttgggctgcatccttgaccagtgaagagagaaaggctcacgagttgggagtcgtcgaggagcttgatgaaaatgggaatacgatacgcaggcaagttgaaattgccatgttggatatgactgatatggagaacccgttcttcatctatcctatctaaacgacacgccattggaaattccgtcaccatatctctagagaaattatcggctagggaaaatatacatactatcgtcgctctgacaatgtcgaagtacacacttcgccggataacatattattccaagcagatcggttgcgagggtctgtaatttatgtaatacccggacctataaattactatgcgttgttagtttactactttcagtttagcacctcaagacctcgttctgtaaggtccgccttctgttgctccggcataaaaagctcgccctgcccttggtataatgctaaagagatcagcaccgaacgcggggaacgctgaaatgtaagagcatgaaagaggttttgtttgctacaatcttcgacatgggttgtctgagatgatagtattcactagacgggtagaatgccctccttctcctagacacgctcctttatccgggagacctatatatagccgtatgaatcagtatacgctcattcgtagaaaagttggcatattggaggtattgcgtgttatttctccatggtcgaaagtacttaggggtacaaggtggggcggatgcaacacagacagataagaaccagggcctccagcaagcttggcctaattacgcagctcgcttgttgaccgttaacgcggggttgtctgaccttcctccccctcttcgcagtcggtcacgaccagctcaacggacactagcttggcgctttccgttacatcaaaatgtcagaaacacttattctacgtacgtcgcacaactcatcttccaacaaatcaacgattctcctcgttcatggcggattctgtggccaggagtaggacgctgtatggccgcttctcgtcgcctaccacgtgctaattcccgacctccctgcccacgggcgatcgcttgagactagacctctggaaatcaacgacgccgctcgccgtcttgcaagtctgatcgaggctaaagcgcagaagcgaatagctcatatagtcgccattagcattggcgcacatgtcgccgctactatggctctgcgtcctgtttcctttcctttcctctctatacttattgtttcgttagacaacgcatttcttctattagaaagaatctggcatataacaactttcatctccctggggtttcatcatctaattgcggtcagatcggatgagagtgtctaggcacgcaggggcgtagtgcgtacctagaccacgaaaataatcaagacgataggaaagggggtgaatcttagacaatatttcaatgaaccaatcataggcgtagatacagccaaattccaggcattaaggcctcaatatggtggaaatgatccttcgcactatgccccttcgtacctagcgtctagtgccgtaatttctcctactagtcagtataacgaaagataaactagcaagtacagcggtcactgtcaacgccgcttgtcgcgattcagtcgctcaagacacaatcgcctttttcagtagcgccccactcactttagataccaatgtcaccgattctgtagcctgtgcgtcaaaatgcgagactctcaacggctgcgaatcctggcttttcaacaccggtggctggtatgacctgttccgcaattccgccgtggccactgcttcgagcccgcactttgtctttggggggtgcgcgaaagacagtcctcgttcgtctgttgttgtttcaagcattgcttctgctacacctgtaagtggctctgtgcaaacatattcttagagaaaagcaagcgggaaagggaaagtccctgtagccgtacataaacacaatagtatcagcactgactaatggtcttttcttcggtatcctagatcgttgcgaatctgcatggaaaaagacatctcgaagctcacaagaagcatgggcattcattccacagccactagtagggcaagtaaaggcacggagcttctggtgacctgcatatcgcaccagcgcttgctttggtcacctcgcgggaaaaaaaaggagagggtttgtttggtggcctcaggcgctctatgtagggtcagatagttccaatacaacttcctcctttgcttctagattttttactctgtagtccccgagaagcattcatatcaatttaacataaaaagagaaaatggtggaattttcgctgttgctgttgctttggcttatcctaagattatcaatttgaacctagcgtagaaactgaagcaatatatatcgagtgatgggacaaccgaaaattactgctggaaatcgaatatacatctccaaacgacaaatgtgagcctctgccttttgatctaacaaagctggagttaaacagatggctgcctataaatgtagaccgatctcaaaatggaataggctatatcgaggtcgcagggccagtcggcaattccttttacagagaggctctgcagaattgtgcagcagagatgagtagagtctagaccgtgccatctcccatcattactcgcatggggctgagtatagtgtgaacatatagaaaaacgtgacctacgtaagtttatgtacaaatcccacttttgtgcagccggaataggaaatacttggcaaaattagactacatatagaagtgataggatcaggatatgtgaccagtttttatttttttttttcatttggtcatatgcgagttgccaaagtccagccacgaggaagcgattagttgctgaggccactatggtggctaaacttcctatgaagttataaaaatgataactagcctctggaagtaactacatatatgcaattaatagcgatgtactgccgtttgatatcaggcagatatagcgaataataaagtggattttagattgctgtttgtatgggttcatcttggacggtgatatatactttccccggatagaataataatgtaagagcgttgtgtgctttcgatccgattcttatggcttcccatttgcaaacaagcttatattcgaatgatgcttaagtgcggttaagaaaatgtgccgcaatttcctcgcaagtcagcttcattgcttaatccacaagtcggggcgacccttacaacccgcccggtcccacaaggttatgaggagaagagacacataagatcgaggaactcctgtcgggcacgaacctcccgaaaaacaagagatttaaaccttttcgggggtcaatgttgcctgtccaatgatacctcgggcggtggcggttgcagaatacgaagtgcgcatttttaagattggctagtgctttgtgagcaatcagacagatgagtggcgttgttgtcgcctaacatatcgtcttagagcgggcatatctccgaaggagatgggtaccttgcataaacagggaaataaaagggaaagaaaagtcaaatgtaacgtgggagttttgggggccgtgggttggaacgtgtaagtaatgtttcgtaccctggccagagttacatcacaacttgagttcgctagggcgtcaaactaacagaactaaaagacgaagtgagacagcaatcttaaatgctgcaaccgaatcaacggtgatccggcttcatcccggatcgacgcatatgattggcgtgcctgatagggaggtggctccatattctggcccccaagggtttagcgcagggtaattaacttttaactccgtcggttctgatcgccttgcttggttttgggaaagttgcgagatgatttgacctcacaccctctgcttctactcttaccctcacttacgctcttactcttcgaaagatgcaaacactcgcttgtcaaacgaatgtaaacggatcttcttacctccactttcccgccttcctgcatctccatgtggtccgactttcgggtagtgccctgcatcccactacgtacaatcgccagtggaccccgaggcgtccgtgccctggtgcctaacttacggatgtgattggattttatatatcaaactaacagtcttggcaccagtcatgaccctcatgctagtgacgctagagtccgttagggtctgttagcctctttcatgcggctcttgcaatttcatttcgccgggataaccccgaataggcatagggtttgcacatacccctctccaacgaaggcctaccatggctgatggctgatctagtttttgtttggaatgcgactctcttacgccactggctatgtggccatgttatgccacgggtttggcttgtgaccagccggtccatgccgcgttcacgtcaagttggcatgcattctgcgtatcctgttagcctttgggtctagtgttcacactatcaagcattgtttccactcgacgagtctgtgttgggtgaccctgcgccggtggggtgcctccggtgaggcactgacctatgaatcgtggaatcatccggatatcacgcacttgctcatttccacgttttggtagctctgttctcttttctgattagtgcgctcaatgtcggaggtcggcatcttccccagggggcggacatggacagtccccagcaggcgctcgttatatttcagtttcttttccccagcggacattctctttcgaccgtcaacactctcatttcgagctctttgggatacttcccaagcagatatttgtctgcgtcccctcgttgtccgcgagataacctgccattcattttcgggttattaagcggtttctgttgcatataatcattgcatataatcattacattcattttagccatgatgttcaagtcttttgccgccgtgtcggccttgtcactctttgcatcgtctgctgttgctctcgatgccagtctgaagaataatgttgctgtctactatggacaaggtttcaaccaaccccggctctcacatttctgtgaacagaccacgtcggacattatcaacattggctttatcgatcagttccccaaatttgtgggtgacttccctggttccaattttgccaatcagtgtgatggcaactttttccccggtacagagctgcttaatggctgccaccagatctggcaagatatccctatttgcaaagctgctggcaagacaatcctgttgtccatcggtggtggtaccgctacagcccagtctcttccggatgaggccactgcgacctggtttgcggatttcctgtggtattcattcggtccttacaatccatccatctcttcattgggttggaccgaggacttggttggcatcttccctcgcccattcctcacttcctcggttgatggattcgactttgatatcgagtacaacggcggagttggtatgtttccctgaccctctaccttctgactatactttccctaacactcatataggatacgccacactaattaatcgtctacgctcgcatttcgaaaccagcggagagacctactacatctccggagctccccagtgccccattcccgaccctcagctcggcgatgctattaccaactcgtactttgatttcatctgggttcagtggtacaacacccagggttgctctgctgcggattgggtgcacaagaccggcaagttcaacttcgacgactgggtcggtgtcattgagaagagtgtcaatcccaatgctaagctcttcatcggactgcccgcatcggaggatgccgctaatgctggattctacttgacccctgatgaggtgcagccccttgtcgagacttacatggacaagcaccctgatcacttcggtggtatcatgctgtgggaggccaccgctggtgagaataatctcatcaacggaacaacattcactgagcacattaaggatatcctgtacggttgcgctcctcctcctcctcccccgacttcgactgtcacccccatcccttcctcgactgtgactcctgtttcgtcgtccactgtcccgccgtctagctcggctacgccttcggtcacctcggttgcttccagctcagtcgcttcttccagctcggttgtgtcttctagctcagttgtgtcttccacctccgccgcctcttctagctcagttgcgtcttccacgtcggttgcctcatctagctccgctaccccttcggccacctcagttgcttccagctcagtcgcttcttccagctcagtcgcttcttccagctcggttgcctcatctagctcagttgcatcttccacatcggttgtgtcttccacatcggttgcctcatctagctcagttgcttccagctcagttgcttcttccagttcagttgcttccagctcagttgcatcttccagttcggttgcatcttccacatcggttgcctcatctagctcagttgcatcttccacatcggttgtgtcttccacatcggttgcctcatctagctcagttgcttccagctcagttgcttcttccagttcagttgcttccagctcagttgcatcttccagttcggttgcatcttccacatcggttgcctcatctagctcagttgcatcttccacatcggttgtgtcttccacatcggttgcctcatctagctcagttgcttccagctcagttgcttcttccagttcagttgcttccagctcagttgcatcttccagttcggttgcatcttccacatcggttgcctcatctagctcagttgcatcttccacatcggttgtgtcttccacatcggttgcctcatctagctccgctaccccttcggccacctcagttgcttccagctcagtcgcttcttccagctcagttgcatcttccagttcggttgcatcttccacatcggttgcgtcttccagctcagttgcttccagctcagtcgcttcttccagctcagttgcttcttccagttcggtcgcttcttccagctcggtgtcttccaccacccctgctacctctgagcagtcttcctccacttcgagcctccctagcagctctgtgacgactactcctgcttcatccggacatcccgccccccactcctccgccaccggaaagccccacagctcgcatgctggccatggccatggacatggacatggccaccacacccacacccacccccatccccacactgtcccaagctccactcccctgatcccgggacacccttcaagcaccgctcccatctcttctgcgaccgagtctagcgcctcttccactagcgaaggtgtcatcccgaccggtgtatcatctaccagcgacgagaccactgggagctccaagcctaccagcattgagactaccggtgcttccaagcctaccggtgacaacactaccggtggttctagctctactggcgtcgagaccactgggagctccaagcctaccagcattgagactaccggtgcttccaagcctaccggtgacaacactaccggtggttctagctctactggcgtcgagaccactgggagctccaagcctaccaagtctactggaggatccaagcctaccagcgtcgagacttctggcgattccaagcctaccggtgacaacactactggtggttctagctctactagcgtcgagactaccggaggctccaagcctactggcaacaacttcactggaggatccaagcctaccggtactgactcaaccacagccccggctggtatcaccgccactgcctctgtgactgcctcgccttcctccttggctcccggtacgaccacaactatcatcgtgacctcgtacgttgatatttgcccaactggattcactaccatcaccaccactattaccaaaacctactgtcctggtgatgtctccgctaccgctaccccaactggcaccgcggagatcactgctcctacttctgggcctgccacttccactccttacattcccgaaggctggaccactactgtgactgtttgcacccagtgtgccgctaccccgactaccgttaccctcactaagcccgctgctactactaccactgaggttgtgtcgcagcccaccgccccttcggtgcctgaggaatacactaccaccgtgactttctgcaagcactgtggtcctactggtagcaccgtcaccattaccatcccggctcctactgttactgctactgccaccgcaactgccaccgcaactgctactagcattgttcctggctctggctctggctcttctggaaacggtgagggctccggctccggctctagctctggctctactggtgaggttacagtgcccggtgtcgcccctgtgtcgccatcttcttcctccaagcccatccccagtcatggagcaggaggcttccacgtcggcaagccgtcctcgagcatagccttccgcccctcgcccgcgcgcactgccgtgcctgccgtgcctaccgtcgcgaccaccgccacgaacacacccgcattgcccaccaaccaagagggcgtgtctccggtgtacaccggtgcagcctcgcgttccaacatgaccggcttgttcggtggcgtcctcgccatcgctctttccatgttcatgatgctgtaaagctgcccacttgcccggacagcatgatctcatcatgcgatatgattgatctcacgaatgctgatttcaagacaaactggtactttctagcgactggttgcttttggttcattacgatgtttataatattcttgttcatccgatctccagtctctggagtgattcgatacctcctggcctctttttgtgatttactctggccagtagcggtgagaccatcgtgttcttcgcattgaagtttgcgagcggtcgagtccgtttcaattccctaatgatatccttttcaagtgtggccatctagcctgacttctctcatttttatttcctgtttccatatttacaacggacaacgatgctctttgtataaaaatactacccatttgcatataatgcagtgaagagaatattatcaattattttctggcagttaaaatcctgtaatgacagctttccatctcaataatattcatcatgtcgatgatcgtccaatagctgtgacaattcccccgcattccgacatccacggacctcggctgcggagaagtaataaatggcaacctcacttttgaacttcgattgttccttcaaaatacataaaatgctaccattgaaaggaatcaaagtcatcgagctagcaggcctagctccaggtacgcaatcaatccaagaaacatcaccatcacaactaacatcccaccccaggcccattcgcaggcctcctgctagctgactacggcgcctcagtcctccgtatagaccgacccaactcgacaagcgttgaccaattaacccgcgaccaactaacccgcaacaaaacctccataacgctcgacttacgcaaccaaaactccctaaacatcctcctccgcctcctcccaaccgccgatatcctaatcgaccccttccggccaggcgtcctcgaacgcctcggcctctccccaacagaagtcctccaaaaacacaatccccgcctaatcgtcgcgcgaatgaccggcttccgccgcgacggaaaatacaaagacatggccggccacgacataaactacatcgccgtctcgggagtgctgtcgacgctcggccgcgcaggcgagaagccccacgccccaggcaacatcctcggcgacttcgccggcggcggcgcagtctgtttccagggaatcttgctcacgctcatctcgcgctcgcataccggccgtggccaggtcgtcgaggcgaatatggtcgacggctcggcgtaccttgctacgttcccgcggttggcgaggaagactcccgcgtgggcgcagccgcgtggcgagaacctgctcgatggtgggtgtccgtattatgatacgtacgagactaaggatgccgggcggtattttgctgttggggcgttggagccgcagttttatgcggcgttggtgcgtgggcttgggtttgagattggggagcttccggagagggaggatcggacgcagtggcctgtcttaagggagatttttacgaggaggtttaaggagaagactcgcgtggagtgggaggctgtttttgatggtacggatgcttgtgctacgcctgttttggagcaggcggagcttgaggagggtggctatgagcagcggcctatggtgcatctggttagtacgcctggcaaacccatttcggcggacaatggtgggtggtcgggcggcgggcttttgcctggggatgggggcgttgacacgcttagggagtgggcggggtgggagcagggtaaggattttgaggttaggaaggatggggcttttgtggcgatggatgggaaatccaagatttgaggcggtgcatcatatgttcgagataatttagactatataactgggtctaacgaggtagatatatacttcagttcccctttcccgagatcaacacatcgcaggcattgaacttcataaatgccaaagccaagtcccaaaaaccatgcattatcattaccattaccaccaaatgcaaacaccagtctagatctatagaccatagacaagaacagcatgtacagaaacaagaacaagagccaatacgggcgacaaagcagtgccgccaatagcagcgacaccaccattactcttctgactatcactcttcttcgcgccaacggcactactagaagttgtggcatgagccccactaaaagccggctcgggctccgatacggagttataatattcgcgaatgatatcgctcgcctgttcagcgacaccatatgtcgaggacatcaggtgcgtggacaaggcaatggggatgacgctggcatccgcaacgcgcacgttagcaagaccgtacacgcgcagattggcgtcgacgacaccgccctgcttctccggcagcatcgcgcaagatgaggacgggtggaactctgtgccggcttccttgcgtagccatgctatccagtcgtcgtcgctctggacggttgagcctggggaggtctcgtttgtgaggcttccgctcattgggctggtttcgccgatttggcgggcgagtttgatacctgcgagcaggatctcggagtctgggtattgttagtgttggggacttggtttgcatgttagatggggtacataccagctgggttattcagatagttcgggtcgattacagggtagtccattgggtctgaggagttgatgtagatacggccgtggctgaatgggtgttggagggcagctgtgatgccgatatcaccgtttccatcgctgttcatgaacaggagctcgatttgacctgtcgggcctttgaagatgtttgatgtcgtgttgcagattgctttgtagccggtgaccacgccgtcgtcgtaagtagtgttcggtgaatactggtcgattgagtcgaggaatttcgagtcatattcgttgactttactgccgtacatagcggtcgaattcacataggcaacggcagaatcaatgtatgtgaggaatttggggttgttctgcgcgaattagcatctggccttgtttgatcgagtatatacaggacgcaccctatctttgccgccgtcgtaaaagatagaacctgcggtgtccacattcgagctccatttcaccgtagcactctgtaactcggtcagtaatgctcttcttatatataggaagcacactcacaaaatggtcttgaaggtgttggccgacaccaggaagttcagatacgaggtcaacaccagccgcagagaggacgtccttcgggccgacaccgctgtagagtaatacagccgggctgccgacagaaccacccgctaggatgacttccttgttaaccttgaccttcagtttcgttgctccgccatcagtcgtgtactcaacagcactcgctgttttgtcggaagaagtagaattgtcgaaaacaagccgagtcacatgcgcattcgccaatacatcgtagttatcccggtctggaagcggatcgagatacccagaacgactgtaggagcgcgtccaattcgaagggttgatgcatgaggttgagacgtccgcgcccaggttctcacctccgtacatattggcagaaatacctatccccatgttcgctagtgacgttaaccagtagcccacttcggggaatgtgctaggaatgttagccttatcgatcaattccagagaacaggattcagcatactagtccgggtatgatgtatggatcggcccgccggtgccatgatttgatgcattccagacgattccagcctcttgaactacatcatccaccgggggagagaaagtctcgctttttttcatagcagcgtagaatgagtcccacgaccagttatcggctccgtccatatcaccgagcatgtctttccaagcattgatttcgtcttcacccggacgggtcatgtatagtccattgatggcggagctgcctatatcatatctccgtgtcaatcttatgttgcttattctttgggatatcaagcttgtacatacctccaaggaccttcccacgaggccactcaatctcacggtcgtctgcattagtctgcgcaacagtgtaaaagtcccaattcaaaggagtcgtccataatgaatcgaaataagcatatgccggtgtatctgtacgagcattagaaatcgcaaaccccgcggggtcataattaaacgcacctatgcgcttccgataatcatctccattcccgcccgactcaagaacgagtacggtatggttcttatcctccgaaagacgagcgcccaacacgagtccagcttgacctcctcccacaatcacaaagtcataagaatcgtcgatttccgtgcgcggcgataatgcgttcgcgaagtggcttgcgactaggctggcgcctacgatctgagtagcggatagaccagtccgcattgtaagagtggacgcagattgtcgagagtgggtgaaagggtgtatctcatatataaattgccgatcagattgaccagggttaaggctgtggagaaaaacccttgaaaatcttgttatgagcttgggaattcccgtttatcaagtttacgcgcaagatcatcccagataagcacattctgaagcctcaatcgcgttagacaggcgggtcaatattggggttctacaaatgagatcttggttccgctttctccacatggccttttccaatgagtcaactttattttcgaggtacccgtcctggttccatgtttagtatcgctgttcctggatgaggtcgaattggtggctgttggtcgatatgacggtcaacccgatatccccaaatactcaatgtcgcatcaccgacaacacatcagtgctgtgatggcacggctggagatatggttgctatgcatcaaccgcggatccagagccaataatggcctagaattatctccactaacaaagaacacattgacggtgggtctcataacatattctcataggctgacagttagatgatcgcaattataatccatccagtagccagccacgataaaggtgtgtatccagaaggttagaacaaagccccgtcatagtgtctggatttccatggacatgagatgaaacatcaatgacgaaacagggaccgatcgatctgatcccaaattgcatgtttcccattggcagtgatcaagtaacatttattcaacatgatctcaaacagtggaggttcttagggttacgcttgtcagctgcaatttatttactttccgctaatccaatctgagtctggccctgtgactagccacgtcgctaaagttcgacgattttacgatcagcttcttggttcgatccattttgaagagactattgattttgagtagaaatgtggaaagtcacactccgtatgtagtaacattggttgtacaaaaatttttaacccctgaattcattattccacggttatatgatccatggataaagccaaatgaataatcgttctgtccttggattacctcgcagatagattctttcaatcacttgactgtaagggtcctgtgcccctgtaatagcatttatgccagtattttggtggtgtttgtccagctatcgcggctaacttgatagactacaatagacgatctcccttctttgcccagttgaaaaaaggaaaaaccagtgatcgtcagtaagaacacccaaacggtgctatccgattgtcattaggacttccggttggcctggacattgccatacgtgttgaaagttgtgaaaagatgagatttgaacggaaaggctgctggttgaagtggaagtcgaaaagtaaagtgcattggtcgaagcccaaatggggaataaaactttgtataagtatgaggcgtagtacaaagagcatctcatcactatgtctttttagtaattttcttatctctatttttagatctcttcgtagatctcttctcgtttagcagcaaagcttcaattcgaaatacgctagttaatggagagaagaagtaaaagcaatatcatgaaaaaagtaaacatgtagcaattacgtttcatcacacaggcatagtcccaggggtggttgcaaatgcctcttccaatatctccaaacctctaagcagctggtcctcagtgatagtgattggcggggcgatgcgaaaggcacccccaaagctaggatggctactgagattggcccacaagcctaactcataagcccgatccccaatcgccttacccaaagccagcgcagggttcttggtctgacggtcctcaacaatctcaacccctgccataagtccgcgcccacggacatctccgatacagccgtacttgtccttcagtacatttagccgctcatggagtaccttccccatagcacgagagtgctcaaccagcctatcacgcaccacaatctcaagaactttatcgcccacagcagtaggcagtggatcattaacatgggtcgtgtagaagcagaagtcccgctcgacgcacacgcgctcgatctcagcactcgtaacgacagcgctgagcggcaggccattccctagcgtcttgctaagggtgaggatatcaggaacgacttcctcgtggttgatagcaacaagatcgccgcaccggccgattcccgtctgcgcttcgtcgacgatcaaaagcattccacgcttctcgcactcccgctttagagccttgaggtaccccggtggtaggacatgcatgccagccgacgactggatacactccacgatacaagccgccagcgatccgcacgattgcatatcgatcatgcgccagccgtattccatctcggcttgccagtcgtaggatccgtcggcgttgcgaaagatggagcggtatgcgttgggcggtgggagcatcagcattcccggcatcaggggaccttgacctctgcgaccgaagtggtattgtgtgcccagtgcttgcgcggtcacgccatgccaactaccgcctagtccgacgatctcgaactttccggtgtataccttagccatctttatcgctgcttcgttgctctcgccgccggtggagaggaagaaggctttgtcgaggccgggtggcagcaggtcgcagagacgttcgcctaggctgatcactggaggtgataccattcctgagaagaggtggtctagggaggctgcgtggtcggtgattgtctgtacgatttctgggtgcccgtggccgagcaggcaggacatttggccggatgtgaagtccaacactttctgtccggaggctgtgtacacgtagagccctctgctgccacagatcacgtctttgttgaatttggttccatagttgaggaggtactttgctgctttggcttgaagttcttgttgattgacatcattatacaagataggattatcagtcttcgcgggcctgattgtgactgtggactcttctgtggtgattccaggggccatgacggggatatactactgacaagtatgacgattctgacgattctgagtacttatctctttttgaggactcacggcctctttaagtttcttgttcccctcattgatgagttagggtactttctcctctttcgtcttatcttagccgcggagccgcggccaacaggtgtcctcgggcatcacaaagttctcgtatctaatgaagagacattaagttgctaggaactaaagcgaaacctattgataacgaagccaggttcaagcaatagctgggtttactgccgaatacctttactctagtatattccttactccggacttcatcaatttgccacttttatacaaaaatatggtaaatcgaagcttcattttcccgtaatctgctgtttttgaatgatggcatgtaaaatattctctgagaaggtcaagtgactttgggctcacattgacactccaacggatgtccttgagccgccttttgttgacctggaaccttgaaacaatcttttaatttatgatactcggccgcaagtgtattggatcatccaatattaatgactggaattacaggtattgtagaacatcgttaaacgacctatagatacaagaacatgccttcaatatgcattaccatcaccactctcaccactctcaccatacctcaaatcattcagtccttatacctattggcctcgataggaatagcacagccagcaggtgcacgtagattgacgtagtcagctatccacggaccctcccctctaccgtcccaccatttcatttaggaccaccagcaggtccacagttgtattgcagttttctgtcagagtctccaacatactgctgaacaccatgattagtaacattgatccctcgtccggcaacgctgccaacttgatttgggttgggcgcgtatacaatagcttcgccacgttctataatagtggtgccacctccacaggcacaagaattgacttctttcacgttgactgtgaaagccgtgacggcctggtagaaaagaacacagatgtctccacgttcagcgggaacaccattgcaggtgaccgtgttcgagactgaataagtctgggaatcggagacactaaatccaacagaatcaaataggttgctgacgcccagtagttcactagtcgttctgtatcaacaaaggtactatccatgcggttcttagcatagacatagtttagtatcatcggattcatggcttagcggtattcgagaccaattagggctagcgtagcgctaagaggctctcccaaatcccggttcatagatcgaaaaagctcagctgccccacaaggagtttctagttggcaatacatggacccctctttcactatgtaatgcaaggccgtggagatgctaccataatccatatcctatatatctcaaacctataaaaagtactatatctaaattgactgaccatggtagtattttgctcacttgaaagcgttaatcgagtctaacatcctaaagaaccatcaccggaaaatcaccggaaactgctatcttaggcctagcttaagttaagcaacggaatgccgtcggtaccctgtggacctccacggcttggcctccaagatggtcaacgtcgccccgcaacacgagtagcttgttaccccgtagccataccctagtctgacaaaagtccctgatcgggcacatctgatgtactactggccagtctgaatatttgatctctgggtcctcggagaatatgcatattatcaatctcatttccaaattgtggcatgagcaccgaactggtcctaaagtcgaatggcgacaactttggtctgagactcattaggaaaatggcgctttggacgtgaatatgtgttcttgctcccaccttttgagagggtattagcacacttcatttatttcctaccatggtctctacgacgaggagcatatcattgaatcaagacgagttggtccttgaggaatttatttttactatcctactaaatttagccttgggaatgactatatgtacccccccccccggtggcctgcctgaaatttcagtaccaccttccagaatgggtgcgatcatgggatcataatagggaaggaagtcaatactactaaatttaatacactctgaggaaactttgacattactggcaatcatttgacttccatttcgaagttacgtggcatgaaacggaaagtttcaactcacatgccatagaaagaacaatagaatcgacagtaaacgggttcaaaattctatgcgtcaacatgtgtccatatcataatatatttacccgaaagggccatcgagaagcagccattgttgtttgttctttatcggtaacaattgcacaggaatcttcgagattcaggaattcatagcttcagcagacaaattagaatcacttcgcagatccttttcatcatcgaaaaggcaaatccaagacgaagcttgatccagtagcagcaaagccgacaatagcaatagagctgtgaatcatagcgattcgtcttgtatgtgcagtccattgacatcacccaaggcttcagcttagctatagcaacgccagcgacacggttctcgtcatcgtatttgaatatccattctccacctcccagaagctccacagccgtagatagtgtgatgactagcaagggattcagcaggaaccaacaagagctcggtgcatacgcaccaagttcctgttgcacatgatcgcgcgcgcggagaatgctgctttgacatttgcatcgatatatctttgcaggaccaccaaatcccttggagatatgaagaagggttctgaaggaagatggagaggacaaaacgagtgtattgtcggggtcatatgctgggcacatgaccacgcatccaacacagccccactataaattcgatgattcttgttcgttgatgcagctcatctgttgcagaaatctctccaggagtggcattttgtgtcgagccgtgggcttgttgccgcaggacttccatgttggagacatggacaaaatcgtgatcgtatatatgggcgagaacatatgaagaatgaagatagttgggagtttaaatatacgacaacgaatctcctccgatgagaaagaaatcatacatgaggcgtagaaagagctgtttcatctgcaagttgttgaacgctgtgaccagtcgaaccccgatcatcgactgcgtgggaacctggcgaaccgtctttgctcaaatgaattttgtaatcttcttcccagatttcaatgatggtagtaaagataatgactggcagtcgaaccgacaaaagaatggagtggagggttaatggaagatgaacgaccgtgtagatggtagaggttggaaggagatgttgtgcagagataaatagtgcgttggtgaactttgcgcgtagcaaggaattgaggcgacggcgagctcacgttgagagcattgaaagcattgaaagtgttgaaagcgtcaatgatgagctagctctcgacggtaaccttcttttcaggtgctgatgcttgcaaagatctatcaagtgccatccaatatatcgtagtaattaaagaaaggaaaaagaaataaaaagattgcttttgacatcagccagaggatgtgcttataagaggataggataagggagatgagaaataactccccagagctaacattataaagcaaagacggggacaagagaatgaagaaggaagtgagcgaaggaaaagagtcagaattaaatacaaagaagacaaacaaaatgagaacctcaggacgtaattggtgcccgaggcaaccgtacatagaaagatatatgtcgctctcttgcttttaccctcaaaatgctaatctcgaatatattcagtaggatatctatattaaaacattctaacggccccagaaggccttttggagcgcatcacacatcagagtgatacacctcttgccctcagacaatgccccatccatagccaagaacggatgtggcatacccggcatgacctgcaagtcgacaggtacaccggccttctgcaacttctccgcatactgctcgccttccgagcgcagcacatccagctcgccaaccataaccagcgcaggcggcaattgcgagtaatctccatcccagaacagtgggctcgattctgggtgggtgcggtccgcgtcgttggggacatagtggtcgcggtaccagtacatcttaagtgcggggagtgcgggggtccattcgtatcgacgatatgactcgttgttctctactgtggcagtgttgtctgtcacgggaaccgagagcagctgagcgaggaagtgaacaggcggtgacagagtcagtgccttgtgcgtgataatcgcggcaaggtttccgcccgcggaggagccgccggttgcgagtttggatacgtccactgggagtgcggcggggccgtcggcaatcaaccagaggaagacttcccaacagtcatggactgcggccggccaacggttttcgggtgcaagactaggagaaagaatataaattaggccgaaatttctcaaggttatgtatgcatggcgtgattaggtagcttaccggtagtccactgtaatcacgacgcagttgcctcgtacacagagattcgagcacaccacattttccgtgtcgatgttacccagcacccagccaccaccgtggaaatacaacatcaccggccatccaccaggaggcgcttcgcccttgggagtaaagcagcggatgggcactggtgggccctcggtagctcgccgctgaacagtaatgtcttgagtcttgccaacctccagcataggacctgcaccaggaatcaagacaccacttgtccgtgacgcttccacgggccgaaggtgcacttgctggttattgatgacatgctcgttatagaatgcgacatactccgggtgcaacaagtctttgacagactcgtggagcgggtaaggtggttcagtaatgccggcagtcattttggcagttatttagaaaaataaaacacaaagatcgtcggcattcagtgtctttgaggtgttcaaatagggacttggaaagtgcacccccacgcgcagagtggggagaacaatgcggggacacgctgataagctgataagccgattgcattccgctttgggaaaggatcaacggcctatcgcggtgggccagtgccatctcagggacaactgcccgccgtctcttttatttagtatcgagtgcaacctgcatgtatccactgcgcccctcttaacgtccataacgggccacttcatgttcctcggatcggtcttatcggccactacggagccacttgttacgttttaatctcggctaacgtgggatgtagctgtagctccggatgttgccccccgttgataaaaggacctcccacgcgcaagggggggcaacttcctacttctttccatcttttctcaattgactcacccctaactcatactcccttcacctctcacagactttcacaatgtcctccaagaccgccgtccttaccgacaaggcccccaagcccctccccgggatctactcccaggccatcgtcgccaatggcgtcgtctactgctccggcgctgtccccatggacgccgtcactggcaagctgattgatggcgatatcaaggctcacactgtaagatccaacaatatcaattgacctaattcaacctgctaacaccctattctctaacagcaccaatgcattaagaacctgacccacatcctcgaagaggccggcaccgacatcaccaaggtggtcaaggtcaatgtgttcctatccaacatggatgatttcgccgaaatgaactccgtgtacatgcaatactggggtgatgtgaagccctgccggacgtgagttcttaccccgctcctgaatcccttgcgttggagtcatttggagtcatgctttgcccctccatttttgtactctgcgtgatgcttgcgcttgcgcatacagctgtgcgactctgtatgttttatggtttgatttgttgctaaagtatatactttgcaggtgtgttgcggtcaagacgctccctctcaacactgatgtcgagattgagtgcattgctgtgctataaattagttctggcttttattggaatcaatagacaaaattcgaaaatgattatatgactactaccgcagaccacctttcatactattgcagtaactttgcaaaccaactcggatgaaagccaagaccttgacagaccgccgattatcaccgcttttccattaaaggcagtctgtgtacttaccccgcgatgcctgatgtattttctctttgtacaaaacctgcaactctactttcctatttcagcttaaaacccgtcgctaccataaatatgatatattaagcaaagagtacgacctagcaacgatgagccaatcacccgatattttcactcaagaaattcagcggctgagagctgattacgaggagaaaaaagaccggtccaacctgggtttcggtggtgaccgacagataatcgacctcagtttggaaactgttgatggtgtgttctgctacacgtattggtatgagggccagtgtatccggctaggtgatatacctggcaccatctctggcgatatccttcgcctagaccaaaacttgcccgtttcagttgacaatggcgactatgaaattattggtgaccaaatacgtccgctcaagaatgtaccaccactcccagagcacgatgatgactccgaggaacttgatacgattcttgccttgctgccaatagttgaagtcgattccaacaagcattttgtcaaggaaggcaaatacaagagtgagatcaagaatctgcttaaatgccaaggtggatcctgcccaggggtgccgaaatcatcccacatcatccaattactgggaaggtcgccagatggggagctggtgtttgagaaatttaaacctcgctacgtcttggcgaatatttatcctctcgccacctacaaagactggattctacagataatctccgggctaaggatgctccattcacttgggatcatccatcgtgatctccgcatcgacaatatcgtcttctcctctgacatgtctcgcctgcttatttgtgatctcgagagtcgttggggaaatcgcctagcacccgaggtttctcgcgagccggtgttagattctggctggactgagaagtcggatatctatgaccttggttatctcatcaaaggcatgatatacgggaacgtcccgtttacgaacgcggtggaatggcatgtccccgcccctctagctgccgttgtggaggcttgcactcgtaataggcccgagggacgcccaggtttgtatgaacttcatgctatggttgatgggatcgagataagtacttgacgatatcatgaatatgagacctcgggacatctgtcacattgataggcatatacccatgatgtatctgaacgtatatgattttattttcaaaagcaaacagtgagagggatggagttgaaggaactgtttggaatggtgaataaaaacgttccaagggaggtgtgtcctcgcccccctgcaggtgtatgtgggaaaatcacctaggcagtcataatttcctatattccctttattccagattatttacatacatgttcattcttcccttgtaattttcataattaaagagacaaagaaaggacgggcttattgggcaaatcctcattaaacggtgcataatgtgcggtgggtgtattaggaaaaacagtctagtctgatataactttgtacaatgcctgaagccaattgccatgatagcgattttgcaatctatgcaattttccaaaatttctaaagtcggtgtttatcagacaaaaatcggggtgggggttacagtgggggtatggtgggtctgaagtgtgaatagcttcaaaatgatccccaaggggaaataaaaaaaaaggccgcagaggttcttcaatagcagttagccggacattttcctcattggcataggatgcgcctcgctcagtgtatgagacaccaaagagtagggcgctgagccatgggagttggaggttataatgtctgggttgacctttccattgataatcgctttagctattgtttcttcctcagatagaaacccaggaacaacccgtgccttccaatagttgtagccaactgagctttggggctacctgaggagaatatcaggcaagaccgcatagttcagaccacatagttcctatatgtagggaaaatcccctctcctgactccattttctgggatataaccctaaacgatcgaaaagcagtcagtgataggtcagttatctctttgggcctcttgtggtatagcatttgatgtttgactgactcgatggatacttcggtaaacattcagtattgttatatataacgactgagttcattaagccgactatagttcataaaattctgagcgaatatcaaacccgaactctccataatagacaatctctgtccaagacttaattggggaattatatgacgggtgcctttcggtggatttgtcatttgtgtataaaaacaccgcgcattggggttatggctaggatgagcagtttatcagaagcgcattccacaacgtgaaactatcagaaacacttcattcaggtgcctgtcaaatccgtcagattgtccatgaatccaggttcgtctggtccttactggcaaggtcaacccctctgatcacgtgccgtgcacagattcggaacattgggagcagacgaagcgataaccgtttaccacagaattgaaagtaggaaaacagagattctttttgaaagtgtgcaagcttgattccagtattcaaataacttgttgcaattgttggtggtcggagttgttgaccacgtcatcgagggatccagggcacgatcgacttcatcctactttcacctccaaggacaacccttcgatgcacggagaatcattacaatgaattcttagaagatcgaaatttcttcaaatcttccattctcagggactgaaacgaactgacatctgtacagacaaatccacagggatacggctactaacagtcaaaccctcaatacatccctggcactagcaagtcctcagcattccaagctatcaagctaagatggaataccctttaaagagagggtcatgctcaatgccttggattctttcgacacacgcccctcggctgctacattccacccctccacgctatattcgcgtcgacgcgctccagggctaagaacccttcattaaagtactctttagcccttcaacactcctctgggtaccaaccttatgtatatgctatcatttgcatccaattgatgaacttggagtgcgactacaactgggttcgatttgtacacggggcattcaacacgcctgtccgttacctactacacactcacattcttacctacccggcttccgagcaggcagtttaagagggcgacagacagtcgttcttctcttgatcctctcgagatatcgcaatcatggcttctggattttcacctacaccacgaaaggagggaacatggacgaagcttgtgatatttattgcgctatacttgctactcctcgagtctatattggaatgcgtgctcgtgctctacctttacggtaatggccaggttgactcgaaaatgactctgagtgttgtacttgcacttatcgcagtatgtttggcttgaatctttggctattatatcgtctcgctgactcttattcagtcttttctctcggtaccgcttgtcagccttcaaagcctggttgcttggcaatacaacaacattggtggatttggaacccaaaagactattctgcataatgtatgcacatacgtgctgcgcttggatcttatgctttggctagctacaagtatagctggtctagtggtcgctgcacaacaggtgtactgtcttccggaagggacagacggatccttctggagagttggtaaaagctgtgccttccaccgagcatctgtgattgtggctgtgatttcaatgtatgcagcatcctcgttccttggcttctttacttgaactgacaatcctacagggtcactgtgtgcactatgtactgtgcaagggagctttgcgatcgaccatatgatgtatcacttcttggtatctacaagcgccagaaggttctcagagacggcagtatcgtctccggcaatagctgggatagtgaggaaacgctcaagaacgagattctctatctttgccgccaacacgatggaactggagccggggagttctggtctgcggacccaatcgccaacagagtcatctgccatcccagcgtccggcatcctgctcccgtccgtctgcggcctcaactccgagtcaacactgaatccggttcaacatatggagaaattatgtctggaacgacgatttcgccagaggacactcaacatcggatctcacccggatcacaaagcgtggctagcgagttctatcccatctcgagcacatctactactatgttgagtacgcagacaaccaacgagttacgcgctcttctctctgatgcgtttgcccccaaactaccggccattccccaggaacacaccagccataagagaggaaagtcatcactctcttctatcagacgtcttcttccaaagtctttcccattgtctcttccactatcagaggatcctcaaatccaagccctcgcagaccccaacaccgcatcagacgtcgagaaacaggttgtgacaccaaatagcatgcctaagggtatccctcaatcgacaacctaccaacttgtcgcaaacggcaacactccaaacgcctcttcagcatccctcccgcaaagccctgccaacacccagcccaaattcaacctagcacaggaaggccacacccgaacaatgacaatgaactccgccgacgccccagaagtagtcccaacaaccccgtcctccccaccaaaagtgcgccgctcccaaacagcatacgccataccggaaacgcgctcaatccaccacccacaccacccaaactacatcccacgccccccttctcaaccacaaccacgagcatactcccagtcccgccgacaagctcccggtccaaaaatacacccagactcaagacgcaggaccatgcgaccccaacagaacatcatccactatccctcccgcagctcatcctaccacttcgacccaaactacgtcccacgccactcgcagagccagtacaacccccactccaacccccacgctagcagcaccagccagtacggacaccagtcatcgcgctgggccaaccagcgccgctacggctcatcagcccggtccatgccggcgccgatcccccgccgcagcgacgtcgaaataatctaccccagcacgcgtcgcccgcgcagcagtctcccttccggcgcgagtggtccgctcagctgtatcttggagacgactgaccccaatgcgtccggggataatcacaggcctgtctcggctgcttactctgagttgccgtcgaattccattgatcagacgaaataccggggtgcgaatcggacgagtttgggcttctattgagggggtctttggatggtgaagttggaaagagtattaatcgttgtttgtctgcgggtcggacattcttagttctattggtttactttgtaatgttgtatgatttgtatcagtggatagagatagatagtatgcccagatgtagcagggtgacttggttacttccctacttttagtgttgtagttagctttttgataccaaattgaatttgttatacaatagaaagacgaatattcaaacataattaaggagcgaagatacaaagatcagtacaaaaattgatttcgcactcgaaagcagcaagatgcaaaatccgcctcaaggcgacagcagaacacaccgcaaagacatgcaatttcagatcccaaattccattccaggaagtacaccagaccgctagaaaatgaatcaagagaaaaacaatgcaatccccaacctgatatggtacataaacacaaaattaaacaaacccatctaagccctagtctcggtgcttttagacttctgcttctgagcatacttgtagcgataagcctggccgctcttggcttccacatcacggtctcggtcacgacgacggctctctttgccgtgactctcagccaaagaccccggaccccgacccagctcattctcgccccagctcatcatcaaagccttggccatgcgatctcgctccttgaggaggaggtcgatgcgccgctcccactcgcgctcgcgcttgtccacagacagagcgatgcgctggtccatcgcggcggcggtttcgtcctttccggcgatgatgtcttccaggcggcggagctctattttgaagctcttgcgtaggtggttttcggaggttgcagatgaggcgcggagagttgcaagttccgagcgtaaatcggcttcgcgttgctcggcggctacgaggaggttgcggattttgcgcattgactcggcgtgcgaggcgcgcagtgttgagacggctgttgagtgtgcggtgtgcaggctgcggagttggctttggtggtttgcctctagggctgcggtgtccggtcctcttggctctgggttgagagcttcgcgcgctgttgggggtgaagggggtggactaggaggttcgacgaccctgtcttcttgcaagcgggcgatggtctcgagggattcagcatgctgttcttgcgactggagtagattgtgctgggacttggttagggctgttgtgagctcgcttactcggttggagagtcgcgagttctcggtttcgatggttttgatgagggtctgagcttcagtcgcctgatcacgcagacgagctgcttcggtatctgcagctttctgggcggcggataactcccggagttcttgctgaaggcttgcaatgcttggcatgtctggctgttgcggttgctgcacgccttgggtgtccacgaacttgtccttcaatggcgagtgaagtggggatgtgggatcccctgggcccaaatctttgatcagatcgagaatctcgctgtaggtgctgtggccactgacaggcagatctgcagcagcagctttgagagcactctcctgggcttccatatgggtttgaacacggctgagattttcttccagtgtgatgttcttttcctctagaggtcgacttctaacttccaggtcgatatagcgttcctcgagaacctggaaatcattatgcgcacgctctaattccgactcgagcttctcattctccagtccataatcatcgatctgtgcttggagttgatcaatctccgagttcttctcctgtatttgtgcatccttagcccgtgtgacttccttgagcttagtgaatgtctcatctagagtttcatcgcgctttcgcacctgctcttgggaaatattgagttgctggcgcaggtgagcaattgtctccaatcgctccttgtccaaaggagtctgtgcgtctctgttttggagttgctgttgcatctcacgaatctggttcaaaagaggattgagatccgttgtgttcatgctggactggcgtaatagcttttcatgttcctcattcttcttttgaagcgactggacttgctcgcgtagcattgcctcgttgctacttttggcattcatctcgtccaagagagcattcttctgctgcaattctgtctggagatgacggatctgctcactagcagaaacagcctcgagaatacgactgcgatttttcagcaattgattgtcgcattcattcatggcgtgttccatacgtgcgatctgctggtgaagatcctcattctgctcctctggtgcatgactggaggcgtccgacaattttcggacggaaggggatgcagaatcctgggcctcgtcatcgtcggggtattcttcaataccttccagatgggttgaatctttgcggatagcgctagtccggtgcaacaagtgtgaaggagtcgacatatccactggcggtccgaattcactgtactccccagagtcggcttcgtcttcgatgaccggttgcttcgatttccggaaagatcgtcgtactgatccgtagtctacttcagcttcgtcctcctcctcttcgtggtttgctccatcctcatcgcccatcaggtatttctccatattcgcagtaaagtcctcggggcctccaacgtcggataatttatctacatcttgatggaaagggggtagagtttcgtcgttcccatccataggaaaatggccgctcgggaagttgctgaaatccaaggtgtaatcggcaagacgcgcatcgagatctgagcctgtcgggcttccaggagaggcggggcgagagcgatgttgcatttcattatcggaatggtatccatagtcacgagcctggtcacgaccgtggtcgctacgtttcgctgcgacgcgctcggttgaaggagtctgggcggttgcaggagtttgggcgggggacggagatctcaatgggctggaaggatgctggggaggagaggatggcatgaagagaggcgtcaccaatgttgactgtccaatggtgtcatgcgaggttggaaatggcgaggtatagcctgtgttggccatggttgcgcacgcgtgcggatgcgcaaagaggagggcaaccggcaacgataagctctgccaatttagaggtcaaatacaatccgccgggttgcactagagacctccaaaaagaatattaaccgagtaaatagagaaataacaataaccacattgcggggagaaaaggggagactgaagaatctcgcgacggtttgtattggggcgcctgaggcagcaatgtttatctgcctttttaggtctagcggacatttgtactcctttacttctctgttcatgtttattcattcttttctgaaagggaacttatactttgtataatcgtagatcatatatgtccgcctactgacgggtacatatacccatggatggataactatacgtacacaatatggtacatgttgatgattgtaagatgatcctatgatctacctcaagctaggggggtctggtcacctgactaagccacgttgcagttaactggacactcacgtgcagactttatgcaggcaaaaccacattgaaaacgctattcatcacatctaatcttgacaacagttgaaattcaagtatagcatatttgtccgaaatgctagatattcattgtgcttcattggcgtccctgatctagcatatcttggaacaaagcattgagactgctcgccatcggccctgccgacattaactggcgagctgccacgacaagatctttcatacccatggtcaatgtcatctccgcagcccactgccacggttccgccatgcccccaggcagagcattgtaatactcccaacccataacgccaccaaagttgggaaactgctcaatcaacattgccagaacaggtcccatcctctcctgagacacataaccctgcgatccattacccgggtttgtcaacaggccgtatacaatccgtcgcggagaccacccctgggcaaccatagtagcgtacatccgtggatcctcagcaagaccccagccattgtagaactgggtattgtaccagctgatctgagaagcacgagcctgctcgagttcacggtagtcgaaccctgataagttcccaataccaagtaatgcaactgccacaggggccagggtaatgatgaatgcgtcgcccaggtcagccttgagccggtcgatgagtcggacgatgccttgcaaagacatggcctcttccacatcgagatcaattccatcaaggccatggcggcgaatcatggtcaggaaaggataataaaattcttcaaattccatccggctgccgtcaagccgcgtgaaggtgcccggggcggccccgcctaacatgcccatcactttcacgccttgccgctgcacgactggcacttcggcccatagggggtcgaatttggggttgtctggtggatcatcgttgagagtgatgtcccctggtgcagcgttcaagtgaaaagcggcgagaataacatgtgttattccggtgttgttttcgaggagcgggagcatggagacatactgacccccgcctgggatgagtgtttggtggtacaagatcacccgcggacgctcgccgagtccacctcggatcggtggcattttgaagagagcaagatattgaatacccagctatgtgtaatttgtaggaaattattccatggacttcgctttgtgggagctgacgacaagcttgagctttggcggttggtagctgtggggggttcgggatcctccaagctcctagcgtccgagagaaacgaccacagagaagtaaatcattaatgaactccagatctatgcaatggcaaattttaaatcatgtataggatcagccggggaatatcgctgcaacacaaagtagtagatcgggctgaacacctgcgcacgataaacccaaatactcactgactaagctgaatggtagatccatttttgggtaaggctaccacctgggcagcgcttacaagggactatggctattgatttgggataaagtaggctaagtacttatataatttgaattgtatgggacttctagggcatccacttcacacgggcctggattaccgcctcaatactagaaccatggacactgatccctatatccatggcgttgaactcggctcattgggaagagctgaagaatgacatcaaattttgattccggattagtcctccagcaaattgaaacgaacaaccaggaacatagtgtatctcaatgtggacttcccagacatacacgaatgacatgtatccatctcacgagagatagaaaatgaaccagtatatttcaaagggaatgtcgtatagacaagccataatcgccttcgatgagctgatggaggcaaactagtcgtctctagagactacataagttgcaggccatgcccaccgagccttgtggcgaagcaatatcttcttgcggggcagcatatacttctaagttctggtatcaacttcaacactcaatatcatgatggcttttaccatcagtactcggatcatgtcacgtccgcttcttcggctgctgccatccgcacagtctgtcaatgttggattgtggcatcgttgcagtgtcgccacagcatccaatcatccacaccatcctaaccctgggaatttttcgaatcgtcctaaacaagagctttcagaaataggccacaagggtgggaaaaaaggcgggaaagctaccggcgtgggtgggttccataatatggattcagagaaacaggtgagtgccacaacatcgatcaggaaaaagatctttcgttaattgtataatgcgagtaaacagcacgctatcgcttcaaagggcggtcatgctggcggtcatgctggcagtcgtgctggcagtcgtgctggcggccgtgctggcgctcggggaaaggcagtaggcaatggggaaactgagttagaagccgaacagcacggccggtcgcatgagccttcggtagttgcacctggatttgaagaatggaagacaacggcttgagtttcgattaatctgatttaagaaacaatttcatacaaatggacgatcctatgtttaatacaagaggtgccaaagctgcaaggtgcaatgacagacatcattgtatagcaataaggagcaactttctgaaacataaacgaatgtcaaaaaccaaaagagaaacaaccaaccaaccaagctcgctacgtccgcgcgacgaagattagcatatcgagcgaatcagatgacgtcttcaatcctctgtagctgcaggcaaccagctggtcatcttctgactgtggagggaccccacgtccgatttgcggctcgccagaaattgggcccttgatgaagtccgcggtgccatactccgctgggattggctgttgcgcaatctccagtgggggatgcttccacttcgcgatccaagcatcccaagattcggaatttagctcctaaagcttggtgctacataagtccgggtctctaaagaccatgatcgcgcctccaagttgaaaattttcaattgcgtgcgtcagcgagtccgtggtataaaagctaggacaaaattctttgtccgcattgtggctatgcctttgaggaataaataaagccagtgttggctccaatgtatcgagacttgaagctgattgtcaatagaggtgagtggtgtatctgctgatattgaagctgatattgaagctgaggttgaagctgatgctgagcttaatgacggtatttcggtgagtaatgagagagtctgggggatggtggtttcggagccattttgcgaaatgcacgtatcagatacgtggaagaagagaagtgatcaaccaaaacgtgatgatgaatgtgtcagatcgatggaagatgaagatctagctactgcgtgaagctctttaataaatttatacgaataaagctacagagatcttatcctctagaatctagaaaaaagatctctgcaggcggaataaagagtctgccaacacggcaatctgcctgcgagaggagagagaaggagagaaagagaaaccaaatagaggtctgcagactgcatagggaaacagtgaaagggcccaaatgtatcatatataccctacgataatcaaatactatgaatgttctgaaacagggaactacatatgtaatcgtacacaccagcaggagcgatctacacagtacatcggtacatacgtgagttttggggttcggttaaccaactgccatgaatcaacgttcataaatatatctatgcagtctcttaaaggcctagagaggtcccctactcagggattgttagcggttattctaaaaaaccccagaaagacctcaaaaaagacggatggaaagatgataacaaagtggtgtgcatttaggactttctctacggaatttacgagcgatttggatgttataggtattttagagtagggcatatgtcgagtttatgaatatgtgctttaaatagagaactactgcacgtgagcgttactagcctcagatttcacctagattataagtactaccaatgtaattaaagtaagtaactttgatttctggtcaggcaataacatcaattgtactatttatacaattcatctatacaattcacggggagttgattttcaatagcaaccaatacgattgccgctctggtccctggatacgtcatcaccctaggaaatcaccaagacaaccttccacccttcaccatctccattgtttccattgtttccatttagcatgaagtaatcttcactcttgacatttggtcatattgcctttcataatggcctccctacggcgtattgctgtggccacgagctcgacgatcatccgactgaccagcttcatatttctacgatgggtataaggtccccataggttaaccttgtgtttcagaaaactcacgcgtttacagatccctggccatcactttgtgcctctcgtggttacctctctcgtggtgtacctgtcgtcaataatctccttgctcaaggatacccagcctcacgaaagccaaacgactaaagctcgagactcgaatagtcaggctccacttccgaatgatcagaatctgagatactaacatgcttcacagggcataactccgtgtctagccgtgccaaagatggcgattctgtgcttaaaacactattgacagggctgccctctccaaagtggcccctgctgaccaggatcacaattataatcaatgtagccctggcggtcctgacacttgacttcttgacccgtggtattctactttattctaccacaaatgttgcattctcacgtattggatatgtctccccgaccactgccaacttggtctttcgcgagcggnnnnnnnnnnnnnnnnnnnnnnnnnnnnnnnnnnnnnnnnnnnnnnnnnnnnnnnnnnnnnnnnnnnnnnnnnnnnnnnnnnnnnnnnnnnnnnnnnnnnnnnnnnnnnnnnnnnnnnnnnnnnnnnnnnnnnnnnnnnnnngggcccccctaccagtggcggtcatgttccaggaggtctctgacctaagccaggactggtatgaagagggcatcgtttacaagctggatgactccaccgacttcactacaactgtgaccctgaccgacctgaagccggcgacacagtatcgctactcgctgtccaacaacaagtctggcacatttaccacggcaccattgcccgaaacttccgaatcaagccgactatcatttgtaacatcaagttgtctgaagccaaacttcccttacaacctactatcgcatccactacgggtcccgggcctcgagcaaatgaccgacgccctcgccaaactgcccaagctattccgtccatcattcatgctcttcctaggcgacttcatctacatagatgttccctggcgctttggctcaacaatgtcacactaccgtagcgagtacagacgtatctactcatccccctcctggacccacggaccagaagacaaccgcgccattgacctcccctggctgcataccctggatgaccacgagatcgaaaacgactggtcgcaaggcaacataaccgccccgtatcccgcagcagcagaccccttcatccactaccacgtgcgagcaaacccacccattcccgcagcacccttcgccgacccagacaacgtaacctacttcgccttcacccacggcccagcctcattcttcatgctagacacacgtacctaccgcaccgagccctcttacaagaactcaaccattctcggccaatcccagctccaatctctcctcgcgtacatctcgaccccagagccagccggcacacactggaaaatcatctcctccagcgtccccttcactaagaactggcacgtcggcaccacagatacatggggcgggttcctggacgagcgccgcaccgtcttcgaagcaatgtggcgcgcagagcgcgatctaggcatccgcatcgtcatgcttagcggtgacagacatgaattcggggctactaggttcccagacccggaacttaaactcggtccagatcagctgttgcctaacacggccgggctgggactgcatgagttcagcgttggcccattgagcatgttttacctccccatccgtacataccaccagacagactccgaggatgttatggtgaagtacgcgccgaatgggaatagtaagttcgggcttattgatatcgcggacgaggttgaagatgttggtttgaccgctgctgcgcctgttcgcgctcgcagctcggttctgacgtactcgttgtatgtggatggggaagttgtttggaagtatcgtcttagtgtcccattagaccgcgacgtgagtgtccatcgcccgtctctgccgccgggccgtgtggttgaggatgacattccggatctgagttggagtgtggtgcttgggactgttgtgggacgggtgccggtattggctaagcgggttgttgagacggttaatggtctttactatcaacttgcagatcgactagagaagatggagagacttgattagttcattagactagactgtttctcaaaggaagcgcctcgcttgctcggtcggatctgttcaaggcgagttgaaccaagctggtagtctcgaataatatagtagtaaaattagcgctagttcaatctaaacaatttccttttttaagcaatcatcaaatgaattagatgcccggcaagcccggagtgagatgggctgcgttgtatctcgttacatagctatgtggttatgaaggagggttttatacacggtttgcactgcagaacaggggactgctaaaccaaaaacttgacgccgtttgactttgccccctggatccgttcactggggtataagatgtagacaaaagggatgagaggagagtggagaccgaagaccaatgacgcatgcgataggggaaatgcttcttgccaatatggaagattcaagatatcgattgtcgcgaccagtaaagtaagaggaatagagaaatgaaagaaaatcggagacttcttcacgaataattaattgggtcggtagtggcgatatagtggctccaaatggaaggcgaagacaaagacctcatggctcgacggcgtcgattagaagagtccaccgctggaacggccgtgaccacctcttgtcgtcacttcgtcttcgttgcctccagcaattccgcccagcagactggcgccccagatgccggcgataccccacatgccaatacgccagccgcggtacaggccctgaataccttggccttgctgtcgcttcttctgtgaggtacgctggccgaggagctgcttggcgcgctccttctcggacggtttcgagctgacaccttcttcataaacgacatgccacatcgtgccaatgataccgcggtaagtccgcggggtagggacaatggtttccacatcggacgcatcaatagatgctgtactgatgctaccgcctgagtacttttggcgcagactcaaggatgtgtatgtagcgatctgggcgcgtcggagcacggtctcgagtgggaatcgcacggcgagttcaagtcctgagacaaggaaggcacacatgttccatgcgttaggatttaggagaggatcaatggacagatacgatttgaggaagagtggtgtcgaggtcataatgagggtaggaagacttgaatgaagcaccgtgattgggacgagatgcgaagggatcgtgcagttgggcgtggggagctggcggatagctcggacaagggaccttggcccatgggttgctggcgtgagcatcaggaatgtacgagcggtgtcgatgggagctaggatcagggcggatagcgaggttgaaatgaatgacaccaccagggttgccagaggggatgatgccgtcagaatgtccgctgtcatcgacatggaaatgtcctcttctggcaagccagcgattgccgatagaagactacggatgaaggtgttcaaggtgggcaggagaagtgagtaaatgaatgtagagttggaggacttccagagggaggttggcccgctggaggaccagagctgggataaaacttcggtcaaggagttcgagttcttgagagtcaagacatgtttagactgtgcggcagactctggtcgaatataaccactacggtcggtgatgtggtggtgtgatttacgagatcgaggtgtactcgggctcggcgttggaggggcagctgaggtgaagtaactggtttcatcatcggatgtttctgagtcctatacacaaatctgtcagtcatttaaagccatatattagctttagataacagcctccttactgaatcataagagcttccttcagtacccggcatcgagttccgatcccactgctcctctgcggcgtctggtacgacatacacctgcaggatggttttggcgacgtcgaacggctgtgcagtaagaaccttggtgtagcgaacaagcgctcggttcaatgcatcgcgggcccagtcagacaccgagggtgaagcttccagataatcggcatagtccaagtccggcatgaactcacgcgctgtgctgccaaacacctgggctgacgacggcgatgccacttcagcaggcgcatttgaagcgggcgataagccagacggggggatatagtaaggccgcaagggattgatcccttcacgagacgccataatgtgatgatgatcggagataaaggtggttcggggaaagaagaacgggaggagtggaatgtccgaacgcccaagctttgtcagtccttttttttcctccgcggccattggacggtcatcgctcgctcttccattttcgcccggatgctctttttttctctgttggctttcaaaatccccttttaatttatttattccctcttctacaacatggctttctggcgagaagttggtcagcagttgcgccgtgtacctaagaccggggatatctgtttgactcaatcgcggagatccctaagttattcaaggtcatggaggaacaccggaatcacaacacccagtcgctcgcaaaccaatgcacagagatcccttcaatcaccttggaaaggatataatacagcccggcgtgccttctcagtgactgcacaagctgcgcatggtcatatcacgccgcccaagcccggcgaagagtacgcccaccagatcgcagttcttgcgctgttgtactatttctgactgactctgtaggatcaacttgactttcatcgataaggatggcaccaaggtcgacctccaagttgccgagggggataacctactcgatatcgcacaggcaaatgaccttgaaatggaaggtgagttgagccgatataatgcttatttgaccccaaattgctgactttatcccgggaataggtgcatgcggaggatcctgtgcctgctcaacttgccatgtgattgtggatgacccggaaacctttgataaaatggaagaaccatcggacgacgagaacgacatgttggacctggctttcgggcttaccgagacctcccggctggggtgccaggtgattatgaccaaggatcttgacggaatggttgtgcgattgccgtccatgacacggaatctccaagcaagcgactttgagtcgaaataaagacactagcagagaccccgggagggactgtttttgatctggaaaaccctcacatattatccgaatagccagatggttacagcgggggtttgtggtcctattcgtcctatttggacgccgaataggactttgtactgtaatattcgtccgatgcatctggtggacttgcgcggtatcgcaaaatgaaaatctcctgtactatttttatcaaacaagactctctacataagcaatgtagacaaaatatataacaaaaaaatatcttccaacgccagaaatatgccatgggtaatcgtagatccagctcacgcctcttcgatattcaaaggctttcccttctttccattgatcaattcaaggaatccttgcttgctgacctcgttggcagccttctcccgctctcccataccaattgtgcccttcttgcgctcatccttggccgcctcctctccgcggacttgagccgcgcgcacagcattgaacagcttcacgacaccacgctgcgccatcttgcgcacccgcttctcctcctcagcgacgggaccggcaattcctcgctggatacccatcacatcacggacgcggccgcgatccatttcctctttcttctcggcgcgcattttagcccgcgcggcgttgtcgagcttctcatctgcagcctcgttgaccaacttcgcagcatacgagcttcgcgagagaacgggatcagcccgtgcggaggtaggaagtttcgtggatagaattttggagatggaggttgagaatgcggtagggtcgttgcgcttagggacagctcggccgcgattggcgcctgtgggtttgccggccggagacgagtcggaaagatcatctgcatcagaatcagacgcgtcgctttcatcgtcgtcattctcaaggtcttcgtcgtccagctcaatctcctcgccgatattggagtctgagtcgctatcgtctgattttttcggttccggtgtgggtgcttcttcttgtgtctttgccttcttcatgcggatatcgagagccgagggcttggctactgtgacacctccctcttcggcgtctgagtcttcaagactgacggggttgaaattgccatcttcttcttcgtcctcggagctgctgtgatagaagcgctgcttgacgaacttcttcttgcgaccagtgttgccctttaggccatcaaggaccttgcgttttttggaaacagcaggaggcattgtcacagaaaaatattgcgataaatgcaagcaaagaagaaagtcaagacgctgatccaaaagtgcccgtatcacaactttttttgggggcggtgagaaaccatcggctctccgattggcccctccacattgcctctctggtctctcaacgggcttcatcctcacccctccaccatcgcgaaatcattgacgactacggtcttagtctaatttattttctaattgtttacctacgcacatattcaccatggttcttcaagaccttgggcggcgaatcaactccgctgtcaatgacctgacgaggtccagtaacctcgatgagaaggtatgctatgtgtccagtgtggcccataagccagcccgctaatataacaacaggccttcgatgacatgctcaaagaaatttgcgccgctcttctttccgccgatgtcaacgtccgtctcgttggaaccctacgcaaatcgatcaaggctagcgtaaacttcgcatcgctcccagccgcagtgaacaagaagcgactgatccagaagaccgtcttcgacgagctcgtaaaattggtggacccgcgtgcagactccttccggccgaagaagggtcgctccaatgtgatcatgttcgtcggtttgcagggtgcgggtaagacaacaacgtgtacaaagctggctcggcactaccagacgcgaggattcaaaacagcgctggtttgcgcagataccttccgtgccggtgcttttgatcagctgaaacagaacgctaccaaggccaagatcccatactatggtagtctgacgcagacggatcctgctgtcgtggccgcggagggtgtggccaagtttaagaaagagcgtttcgatatcatcattgtcgataccagtggtcgccaccgacaagaggaggagctcttcacggaaatgacacaaattcagaatgctgtaacaccagatcagactattctcgtgctcgacagcacaattggtcaatctgccgaggctcagtccgctgcgttcaaggcaacggcagactttggagctattattattaccaagactgacggtcatgccgccggtggtggtgccatttccgctgtcgccgcgacgcacactcctattatcttccttggtactggtgagcacatgatggacctagagcgattcgagccccgcgcgtttgttcagaagctactaggcatgggcgatgtcgccgggctggtcgagcatgtacaggccatgacaaaggattccgcgggtgccaaggagacatacaagcacattgcggaaggtatctacactctgcgcgacttccgggagaacatcacctcaatcatgaagatgggcccgctgtctaaattgtccggcatgattcccggtctgtctaacatgacccagggtctggatgacgaggacggctcactgaagctgcgccgcatggtctacatcttcgacagcatgactgtagccgagctggatggcgacggcaagaacttcgtcgagcagcctagccgcatggtccgcatcgcgcacggcagcggaaccagcgtccgtgaagttgaggacgtgctctcccagcaccgcatgatggccggcatggccaagcgtgttggcggccagaagaagcagatgcaacaagctcagaacatgatgaagggcggaaacaagaaccagcagatggctgccatgcagaagcgcatggcgtcgatgggcggtgccggcggcggtggcatgcccggtatgcccgatatggccaagatgatgcagatgatgggaggtggcggtggcggcatgccggatatgcagagcctaatgagccaaatgggcgggttgatgggtggaatgggaggaggtggtggtggacgtggaagaggacgttaagcccgggctttgctaatcttcttgtttcatccctgcgtttttctttctcctttccatatcccaccgctggctcatcaacttagcatttgggctggtgtttggcgttttcttgctacttcgcattatatgcaacccttgtatacgagaacaaatttggtaatgagcctatcactatcacatataccatcctgaaaaaggaatcatgtccccttcttgttctaccacaattacacttttgaaacggaagtttgcagtgcggtactatcgttgtattcataataaaatcacgttgtacacataatcctgaaacagaaacgccgctaaaatccatccgtctaataagattagagaattgatacgaaaacaaagggaccgccagatcaaccatggccatgttcatggcggccaggagatcatgcaccaggcgagcccagtgagatcgaatgagaatcaacatgttatgcttttgtgttgggggatagcaaataaatcgagtcatataaatatagatgaagcccagatcgcttccccatgagaggtaggtcgagaaagacaggaaggatatgaaacaagtccgtatggtacatggagcgcccgggagaggatggggggtatgggtatcaaaagtgtccttgtagggaggaccggaaaaaaacacaaaggaaacccggacgcatgaaatccataacaaggattgcttatttttcggcgaagcgacggtcgaagtatcggagcacacccatgacgcttgcagcctcaacttccagggcagcgcggctgccagggggagcgatttcgcggggatcggggagggtgtggagcttcggcagccaggttgagatttcgtcggtggcgcgggagaagttcgggtgacgggagagggtggtaaaggcgtcagcacagctgagtgttagctctgatggcggagcgggcttgggtgcaggaggttgcgaaggcatgggggcgttgttacgcggcttgggcgcggtggcgggggcatttctcgacatgcagcatccaccgtcctttcctccgcctccgcagcagcctcctcccgatggagtgccgctcgctgaccgggaggctgccaacgtcttgcaaaaaagagtgcttcgggggtcggactggcactgggcgcaggtgcctggaccgttggcacaggaattagtcgcttggctgataggtgggagggtcacttctgagcggacgtctccctcggatggtggcggggtgaattgggagatggattgaatcggtgcgagacgattggtctcaaatgtattgatgttgcgtacacgttgctgctcctgtgcggccatttcggcgcagatgcagggagtgccgtcttggcagaacccgcagggatcaacgggaggcgaagaaacatcgttgtcgtgagactgggttggaacgctagaaaactgagcggtaaagtcgatttccatctcttccggatcgggcttgatgtggggatccctatgatctcgttccgggctgccaacgccatgaggtgagtgtctagaacgagacgactcatgggtatcaatttgcatgccaaatgcatcttcaatgcactggcagtgggcgttggagcagttgttgcaccccggaggtatactcatctggctatcttccttgttgcgttcggtacttgtaggctgaacatcctccattcgggagcttttggtcttacgaggtggcaagggaacagagtccggaacgggcgcaggcttgctgacactagggccagcgaaagatgaccggaactccttgacaagggtttcctttgcgctgcgctcgatcgatacttccttctctaaggcgtgacaccggtcgcgccaccatcccatctcttcacggcattgatcaatctcaccagagaggtttccaatttgctgttggagcgaggcgacttggatctcgtggctatcttcaatttctttcatttgctcttccagttcactaacacgggcggcccggcgctcacggaacgctcgttgagctgctcggttctgagctttgcgtttggttggcggtgtatctgtagctggcttgcgaccaggcttgggacgtggtgggattacccattctcgcgaggtgatggagccgggggtacccgggcctggagatggggctacagagggcctggcggctagcgtgggcgccggtgcgagggccagtgcagaaaccccagctggagcaggtgccatagacacactggccatcttgacaccaaattgagcttcaaatactgtttggaggtcagttgtgggcaactaatcgggcgtagtcggggcacacgcacgagccgtttctcggtcggaagagcggaagtgcgctcataagagccgataagcgaaaatgactagttggagagaaagaacgaggttcctttcaaactctgttctgtatgagataatcagactggggatggacgcatggacactcaaagagtatagaaaggttaaagagaagagagagatgcgaagggagggggaggaagccgagaaaaagcggccgatgatcagattagattatgtgctcacatgatgccggtttcggacattgagctttcggttgttatagaagttccgttcttccaaggttggctcttctttttctttttctgctgatttaccattggtctatttactatttcgctaaacctaatcctgtaaggagctcctcttttgaaatttttatctgatccgaatctgagtggagatggttccgagcaagcgttggtgggctgacgcaacatattctactgtatggagtaatataatctcttattttcttcgctaactgcgtgtaattgtttcatagacgcagctcgagcaccaattgcttgaactagaaccagcaaaggacagttgcaatggcaaaatcccgtcccaacttccaactctgcacttcataacgtactgacttcctatgcagctcaccgttctcccgcctgatcttcgatgactcaatgacaggcgacacggatcaaaattctccagtcaaagtaaaatttgttcgagtggagcgtctcgtcaatccattgaccatgggtgggcgagacgccccctacttccggttctaccagccctgtagccacttagcactacctagtagcaacggccatcgggccaatgagaacgtgccaatgcacaagggaactttcccacgagtcatccatcagcggtgagagtatggaagagtatggatcgacatgggaattggaacccgttcagccgccgttctcggtctctctgatcttatctgattgcactaacgccgctctagggtcaaccgcaatccaagggttggagtgaatatcggcaaacttatccctctttcactgccgtatctttttccctctctggatgattggttcggccttctgtggaagtggttggtggtcttggcccttgcaaatgcccccccacatagcagaatcttatcaatcagtgaacgatgctcgccaacctcattccgagcgagggccgaacagcggaactttcgtgtacatcgcccgatctggagaataccgccgccagttagtcacagctagagctgcttgtgacgtgcgtatgcagagattgacggtgggaaaagtggaatgtgtggaaagaaatcgccgccattggacacgcccagtctcggcggaaaattcaatccactattctcagttatatctttccagtgtacataaaccgacttaatgacgcagtctagtgatattctagcaaacaccagggacttccaatttgctcttgatctgctgagatgaattccaataaggattctagctaaagctaatcaatgccgggcttgttgttcgtcttcggggctctcaatctgcaagggacatgagctctacgttgatatctagaatatgtttcggttatctagtatttgattcataaaataccaatactttctggggagtcaaagaagtgagaacagaaatcacctttcctttgacgagatcaggttgaccatttgccactgaacgtttctgaggggcgggtctagtatagttatatacgtctgagcggaaattaacacagggctcattccaaattgagagctattctctccaagacattcatcaacatcgatgtaacaagcattcacaactgcgttaatcgaggagttccctctgctggaggagcagagtactgggtctccacaaagaccttctgcatgcctatctcccgcttattgaaactcgcatacaatttttccatgtcttccaaatggacacggtgggtcaccatatctagcggattgatctggtttgtctcgatgagatgcatgaggtgcttccaatacttttgaacaggagcttgtccattacccataaggtgaacacctgtctgcatcagagccccaatgttaaagtgattggtctgggagtgattgttagatacttcactcttccgaaaaccggtgaactcacaaatgcgctatagacacctgtcaccccaacatgaccgaacgggcgaacggcagtgatcatttcattcaacatctccgaagtgtccgtctccaacccaagcctctgctcaaagtaatgcgcccatcctttggcatattcacccgatgcacactctaaagcaacatcgggtccgccctcgaccatctttttcagctgtgatgtcaccgactcacctttcggtaggtcactgaagatgatcgtctcgatcctcggttctttagtcttcacgaagtccaatcgccatgcaccgtcacctccatcgataaggatgactcgactagctccatggaagaagctatactgtgcgcacatctgcccaatcggtccggctccccagatcgcaacaacatctcctttcttcacacccgtgtcgaccacacagttccatgatgttgccataacatctgagacataaagtgccttctcatctggtacatctgctggaatttgaagcaaattgacgtcgccgtacggaactcgaacatactcggcctggccacctgcaaacccacctgtgaaatgggaatagccaaacatgcctttttccaatttagtatcaatatctggaccctcagggccgggtgaaaggtcagatgcacatcggccactctgctcaacttacctgcagttcgcttcccatacaaggcattggccagagcattctcgttggttcgttcacatacagaataatactctttccgacaattcctgcaagtcccacaggcaatcggaaaagcaacaacaactctttctccgactttgacgttctttgcctctggccctacactttccacaattccacagcattcatggccgagcacgtcgcccttctgcatctcgggaatgacccctttgtccggcacatttgtgtcagtctacccggtcgctcggatgatcgtgagattattttcataccgtgatacaggtgcagatcgctaccgcaaatagtggtgcctgtgatcctgacaataacgtctccagggtcgatcacacgcggcttcggcattttcactaatcagtggtcagcaatgtacaaaagcctaacgccggcaatcgcctccctcgcttaccaactttgacttggttcttcccttgccaagtagtagcctggatcatctctcctgtctccattccatgttcattggcgtagttagacacgtcagtggtgattgtcgcattattaccacgtgggagtttcttttccagtaggtttgctgcctgggacatcgccattttcaatatattcgatgatacgtgtggttgggatatagcgagtttatgctttcactgtccatggggttcaataggaacttccggcttggttttaactactagattgcagtatatgtaaaaatgacgaaacttcctggtttgggggtttctgtcaactgacatcaccatgatgcggcatgccaggtgcagagtccatacatatgttatctatacgtacgggattttccctggcgtgtggggctttccgcttttatgagggtcagtaagaccaagctcttgggaaacatctccgcgtacgtacatagcagggcattgcttattctctgatccgaactatgtattggcaaggtcttactagcttctacttctactttacatagtcatttacgaaataaggcctctctatgtaatgtgataagtcattgggcaacatatgcagtctcagaatgataccaatgctcctaggatatattgccgcttaatggtagtgttgattttctcggacgcaaaatctcttcattggctacggacaacgaggagttgctgcagccaaaggcacataaccttgagggctccaattatcccgttgcttaccagcgtctgcgttttggttgaggtgcggcatctctttgttacgacccagagcggaccatgctaacccagatcaggaacccgtcaaagagaggattctgagcaagaatatacaaactactctgggctcgttccctcgtaagctgcattcagaggggacagacaaaacataatggctttttgcggccggccaaagtattgctgcgccgcaacaaatacaacctttccattggtcagcgtcagttgcaaaggcgatgttcaatattctcgtcggaaccaatcttccaaagtatctctgatcttcaaagactatgctgtcccaacaaatcagatgaaatgggctttcaatttgtcagagatacttaataatctacaactactcggctcaggcgggcgctttgctggaccgaaaatctcaaaagaagaagagtcgggatacgtgtgtagtgacagtttcagttctatatatatggacggcaatatcatgcggctactcgacaggtattttccccgttcactcaccaccgccgtgtcttatcctatagtctggatctatacagaaaatagcatcgatcacaacagggtgacaacaaggttctttcatcatcgcagacagctgccagaccgaataggccaagatcaatgtcggaggctccgtgaattgccgtaataactactcgggtcgcagtaattgtcaaataaaggtagggagtcctggccatggttattgtgcataacccgaagagtctctgcgatttgtccatccaactctcgttttcggaagatcgtgggttttcttttcgataagcggaggacatagaccggtactggtatcttgcattcatgggcggtttggtagtcataatcggtgttgtttagatcgaccacaaaagaggagtgcttgccggggtagattgtgaccgcagggaaacgagtcgtattattcctattgtattgatggaggccgtcctgcgcctcgctggcaaatggacgtatagattctaaataattgttcggatcaagaatactattaggagtatcacccagtattcgcatcgttcctggaacaacgtctgggggcaagtcgaacaagatctctcaaatttggcccatcgcgtggctgcgaatatgttgagttgagtcgtccatagcaaggaagaggattgatggtatgtgacaataagtggatgttgctggcctccctgtgcatatgtgaaaagatgaagtctccattgaatgtgaaggtgaagtctatcattgcttgttgagcgaaaggattaatgttcttccgtctttcccctagcaggagcatgaaggttggtcgtctcagcgactgcgagcccctacaacatgcataaggagtcagacttactagaactaatctggtagcaaatggcgtcataggacttgatttcagtgtatgcgatttgtaggaactaagcatttagctaactacggtgtagattgttgcgacgatattaacaagtatcctctcacctgcatataagtactatttgacctgtaagaaaagaacatgtagttgttgtggacagctgaatccgttatcaccggactcggcgataacccccgggggccccgtgaacggatcaggtaccagcccccgtcgggactccgccttttcccctcacgagtcattctctcctccaactcttcctcttccctacactcatacaatctactacatttacaacatgaccaggaagtacagctcgacccaaggcctcgatatgccatgggcttcacaaatgtccgcccagctgcccagtccggtcatttctgtacctgcagcacagccagtccgagctcaggaaccgatcgccgatgaacctgtccgacccgaggattactccaagccctactgcgagttcatgacatccaatcccacgatatttcacgccgttaaatccttctccaatcagctcgaagagcatggctacaagcacctctccgaacgagcggtgtggacatcggagctgaaacgaggcggcaagttctacacttcccgcaacggcagctctttgatcgctttcaacattggctccaaatatgagagcggtaacggcgtggctatcgttgctggccacgtcgatgctttgactgccaaactgaagcccgtgtccaagctaccgaacaaagcaggcttccagcagctcggcgttgccccgtacgccggtggcctcggtaatacttggtgggatcgtgatcttggtattggtggtcgcgtgctcgttcgcgatccgaagactggcaaggtggagaataagctggtcaaacttgactggcctattgcccgtgtgcctaccctcgctccccatttcggaacacctgcgaatggcccgttcaaccaggaaacccaaatggtgcctgtcatcggaattgataactctgatttgtttgaagactcgaagattgagtccagcgacatcaagttcgggacgtttacctcgacccagcctgagaagcttgtgaagatcatctccaaggagcttggcatcacagactacagcactattgtcaactgggaattggaattgtttgatactcagcccgcccaactaggaggtctggagaaggacatgatcttcgccggtcgcattgacgacaagctctgctgctatgctgcacaggaagccctcattgcttcctccgacagcacatcgaccggaaccgtgaagatggttggtatgttcgacgatgaagagattggcagtctgctccgacagggtgctcggtcgaactttatgagcagcgtcattgaacggattaccgaggccttcgcgaaggacaactacggccccaacctcctttctcagacagtggccaacagcttcttggtgtcatcagatgtcattcacgcagtgaacccgaacttcctcaatgtctacctggaaaaccacgcgccccgccttaacgttggcgtgacagtgtctgccgactctaacggacacatgactaccgacagcgttagtgagggcctcattagacgagttgccgagcgctgtgggtcaaccctgcaggtcttccagattcgcaatgactctcgcagcggtggcactattgggcccatgaccagtgcccagatcggcatgagggcgattgactgcggtattccgcagctgagcatgcacagtatccgggcgactactggcagcttggaccccggtctgggtgtcaaattgttcaagggattcttcgactactacgaagaagtcgataaggagttcgccgacttttaaattggtaattccgtgctttgctttagacagttagagccttttctcctttgtgcatccctattccaggcgtatcgtcacgttattctatgctttgggtgtgtgtattagactacaagaagtggcttcattctgtgactatatgtattgcttttccaactcttagcaataagttatctttttgattcgattgctgtacctcaacgaactatatatccaaagaatttccaaacatacatttcacattactatatttttaaaatgacataagaaaaaaaatgagtgtcccacgggtgtatccccatggggtaaatcatggcccgacaactgccaggctcaaagagcgtggtgcaacgttgacgaggaccaaaaaacaaatctgacgggtatatcacatcatactccaagccaccaatgtgactgcatgagccattcaaaaaccaaatacgtgtctataaatcagaccttcaaaacggcaccgccaaatccgcaggcaaaggacgaggatgcgtcagcgtattgggccgactcagaggccgaggagccgagataatccctgtcaatttcttatcttcctctctcgtccagcgcttaatgctagatctgaagctggtcctaggaacaagagcgagaacgcgctccgggtcaccggcgccatactcgtgttcttcgccgggtgcgccgagggttgatgcatcacagttccagtcggagttgcgccgggttgtatcgccgcgggcggggcggctggcattgaaggtcgatatcatgcctgggaatatacgggcgacgaggggttttagggttggtaagcaggcgcatattatgcctgtgttgcattctatggcggaccaggaggcggcgccgacgttgtcgtctagtttgtggggttagcttggtttttgggatgatagggctgagcggtacgatacgtacaggtgggatcggatgattcggcgatttgtttcaggctgactagacggatgatactggtgacgcagacactagtggatgttatgttagtcgtgggaaaagatgatgtttggaacagggtaactcacaagccacccagggcgaacatgatcattaaagcgaccttttgttttcgaggtaagtcgactgccattagagccgggatgggaatgatcaggatagcaacatcggttgagatatgcatactagcattggagaaccacaggttggtcttgttcaaacagaaaccttgtattgaatcgtcccagaatttggccacgggaatgcagttgaggaatgcactgatcaccgcccatgtgccatagacggcgaggatggtgatcatgatccaacatacgacgcgcatgcggtgcgttgggaagactcgaaagtactgcatcagaattgaggctttggcgcagaggacggcggcgttgtagaaaggaatggtgagccagaaggcctattcggattgtttgttagatgcagttgacagctaatgacccggcttagggcaagctcaccttcatctgtctctcgaaaatgtttggtgggatatctttgaaatgcactcccatgccactgacggcttcgataatgtcgaggcccatgaagacatatgaattcacctatacatctgcatcagtatctggagtcctttgatatcagtaccaatcaaccaacccaccagtgcgataataaccatccagtcatttgcttccactcggttcataagtttcatacgagtatacatcctcatcatcacgaagcaggttgccaagaccgtgaacacaacgcttataatcaagccctgctcgcctcgggaggacataagtatgccgtcatcatctcgcctgaagatcgcatctcgaatgtacaatagattcattgtcacgcgatcctgtggcttcaggaaaacaaaggaatggctactcctcaaagagaagattgcccggaggacagcctaacgatccgatcaataagacgatcctgatctgattaacgattaagatagggcacaaaggagcggtaagagaacaacctctccaccaagaggtgaaaaatcaaagaggatatcgctctattataatccaaagcgcataaagctgatgcgcagcgtcgccataaacaaccttatgcagccccagaaaccaaacggcctaggaaagaatccactatccctttttgagagagacacttaaaggacagccattgtatctctcctcgctcctcggatgtacgggcaagtgcttctgacgcaagacagcatccccgtctgggaagcgtgtttgcagcagcatgcagcgcaaggggcgcatacaacgaatcgggtccagcgttggccccgatggactcgatatgtacatctgtactctgtattaattacaacactatgatatttctttgctgtatttccaatttctcttctttcccttttcttccctccttgaacctggtggctgcagtttacacgggaacaaattatagtttgcagggtcttttgatatatcaatttcccacaccttattttgagaccacagaaacatttaccccttccgtctcactggctctgaatggcaataatttcaatttactcctgtcgatcgtccatagacaatcccctctaccaatcagatcgagactacactacgtataggctattcttgctttctaatttgacgcgcgacagactatacttccacggattatcattcggttccaagttgctgggatgctatgttatgtgctacgtacatatataatagttgaagcaattccaaatcactttgaatatgacatgatgcaatatttgcatccggtgtttgcttgcagataggtcggaggtcatctcatttgagattcgatcatctccgaaggtgacactgaagaagcatgtataacaactgacgataacgagcggggcctgagactgcgctgtcccggagccagctagccctaactgcccatggaatctctcactgcagttggcctacatgtggaaagctgctcggcctcagggaccaatgtaagcttaaatttgtcagacctattggttactggctcctaaatcgtggtcatgtgcgccactttaggttaaaagccagcccccagtcccgacacggtggaaactgccaggcaatcacgaagatgatcagtaaaagccagggactcaaagaaatcagcacaaccttcgtatgaataccctatacagaagttgatcaacttttgtcgacttatacccctctcgttctgcagcactatctcgttaccttggagattggaggaatggttagaagaaggtttcgtctgtcttaatagttgaccgagaaacgaacaacccaatgtagacactgtcttattttgcatgttagggcaatattaagctcatcttgatgtgtaaggggcgctccatttattgccactaaactactccgtatgtaacagatctacccgcagctagaatagcagagtgttcaattaaatattgaatcgaaatgcgggggagagagagtaaatctcctatttgttggaacatccagccacctcattcgataatagcggaggtcttgtaagggatgaccatctacgattgacgcggatatccgctcccgaaaagcttcgtttgctactaatatcaggatctgttcagttcatgcgacctactaattggatattgttaatgtttctcatacgaagaccgtcggtctcaggatgatcttgtggccttgactagtcgcgtcccacaacatccaaagctgctaaccacgcaatccaactcgtggcaatgtgtcgagttttgggaaggattcaagaaaaagcaattaatacgttacgcaatttggacttttcgccaacggcatgtggccaaacaagacccctgccaaggtggtgttgggtagttgacgtgtcacatacgatcattagggctagatattcgtctgggcacagacatcggtacagtaacttccctctgtcaaagcatggaagaacatggctttgcatttctactgccaaaatttgaatcctgtagtggaacgctcatatacgcaatacatcttgttaatatgtagggcgttaggttcttgacttgcgttgcatgcaggttgccttgcttgccgagttgtcatggcagcttgggacttgaatcttgcattaatataaaataaaatatagtttctagtctaatttgaggacttgtaattgatgcgtagaacattgtcgatctgctaaccaggagctaactggagctataaaacggttgcaaagtactttgtcgcaattttgagcaattcgatacgccaagacggctctatacctatctctcgattaacaatgtcatgggatagggtgcatctccttaccacctcttcatctctggtcattcatcttactgcagctagtcggattcaaattaggatctgggcagcttaattggactagattccgcgtgtgttgaccactgtctctcgtggttctgagtctacagcctcttatacgggatagtattgcacatttcttgtgctcaaatagcttggtaggaatctgtcaaattgacacctaggcaacttcttgcataccatagaccgaaaatcttcttcagttactgtgggctgtgcaagctacttggcaagatgtcagctccctgttctaaatcaagccactgctggttaaaatgagaagtaatcgtatttccttacagtctgcagcaactctctttgccgttgtctgatttttgatttctctttttccacaaggaccttccggattttggttgagtctgcaggttgaaacatgcaacgtccctattatagggaatattaaatctccacagagagacgtatataatttgaagtaataatcttggaacttagattgattagaagctgtttgcatagaaccatcggacatggtttctttgttgtaactttgatttaactaccctgctgcaagagaagaacgaattggcttggccttcaaagctattttgtgcttactttttggagatactatactatttacacagcctggggaggaatcggcaaccaattggcctggtttccaacatgtgctggtctcaagctggcggtaactgggcattccccgattgaagaaaggaagaaatcctgcttctgctaagacatagaaggatctgtttctagatcttaacctccgttatgccacgagatctcgtcattgaatcaaaattgtgttggcgtatctcaagtctcgtggaaaatcgcttggcaacatcagaattttggtctccgttttaactggcctgccttcaactgaagatggaatgtttgatactatgatctgagtcccaaataactagagaatgaatgtattgtccaattgcttgttacagacgaaagtgccgtagatttggataggcgataagatagaccgataaggacgcacaggccaccgttcacagagaaatttcatttccacaactcggccaattctttcaagtcgccaacgatatcctcttttctcattgtcgatcggtggaaatagtcctcatacacaggacaaaatggcaggcactactgccgaatccaccaaggccgtccatacaatcgtgctggacgctggcccaattctcaagaataccccgccgctttcaaccctccttgcccagtgcgacgagattatcaccaccccctccgtggtggctgagatccgcgatccagatgcccgcgcacgtgtcgagaccctatacctgcctttcttgaagcagcgatcccccacacccaagagcttcaatatcatcagcgaatttgctcgcaagaccggtgaccgttctgttctcagtagaacagatattgaggtcctcgcccttgcgtacgaaattgagtgcgaaaagaatgaaggagattggcggttaagaagcgttcctggccagaagagaatcaatggaaagccacctgtcaaggaggaatccgaggaggctaagcccgaggatgcggaggtagaagccatcacagatggagtcaaggagactacagtcgcagacatccaggaagagattccaaaggaggaagaaaccgctgcagcgaacgaggctgatgaagtcgccgagattgcggccgtgatcgtcgaagaagaagacgaggacgaagatcaggatgcagaggatgatgctgacgacggagaatggatcacaccctctaactataaaaagcgtcttgctgaggatgagtcgggaacatcgactcttaccgctgcgcccaagacaatgcaggttgcgactatgactactgatttcgccgtaagtacatcccacacaacatctgtctattgcccaattgcttattctgtatagtgtcaaaacgttctcctgcaaatgaacctcaaccttctatctaccaccaccctccagaagatccagcatctcagaaccttcatcaagcgttgccacgcttgcttcctgaccacaaaggagatgaacaagcagttctgtcctcgctgtggcaaggatactctcactcgtgtctcatgcaccaccactgccaacggcgcattcacaatgcacctgaagaagaacatgcagtggaacaagcgcggcaatgtatacagcgttcccaagccaattgcaggcagctcgaacggcaagtggaagggcggcggtggccagcgaggatggggcaccgagctcgtccttgccgaagatcagaaggagtatgtccgcgccaaccaggaagaagagcggcggcagcgtcgcgagcgtgatctcatggaccaagactacctgcccggtatcttgaccggtgagcgcaacagggctggtggccgtaccaaggtcggtgctggccgcaatgtcaactcgaagaagcgctaaatgtgctgcgtgtatgattttgcatcttgattatatgggctggagttttggggcatggaaagaaaaagttcacttggtcaataccgctgtcatagtggttgtcggcctttttatgaggaatgaccatgtcttgtgatttacggttgaacatagaatatatagccaatccatagggctctttatgaacattttaacaaaatctttgttgattacctagatcaggtataatattctctagaatgtctagatgaagcctcggataggttatccaaggacagcaaaacaagtatggacatctcagccatccgttgaccacaagaaaaacaccattcgccaaaacatgggctataccacccggtaattcattttccccagtatcgatcaatttaagccttgacaggagtgtctggacaatagcatattagtttgcagttctgcgaaggcgtaattcttgaagaagacgtaccgggctgctgggtgaggagaaggttgtaacgcttcttcagggtgacacggtgactgagaaagaggttagtttccatgcttcaattgtgcaccatgcagaacaaatagctacttaccgagagtacttgtcatcgggggagaagcgagcggggtgggcagacttggtgacctcgccgttcatgacctatgattgccaaaaattagaatcattggccaaagttaaacagtggccgaggagccaaatgtgcgcgcggcagtctcctcggcgcaaagatttccgtaccttcttcaaggtgtaaacacgcttgccagcgggatcgagggtgtactgttcgtcacaaaattagtggccgatctccgaacggagctgaagattcgctcgcttcgatcgcttcgaagtcgcaatgagacataccataagatgcattctgaagagagcgatattagtacatgagaaatgaagaccacttggaacacgaatcgtcaacttacttgacggtattgatgaattgtcctgtgttagtacttgcgtcggcgataagtggaggaatttttttctcgacgatgaagagctcggaccaccctgcttagtcacggggtgctttttaaacggagctttcgaccgcaaaatttcctttttctctcgcacttgagcagaaaagagaataatctctctagaattacccttgagctctgttaatgtacagagccatggttattctttactaattggcacttgattcaggttgttcatacatacagagacttctaggtaagatgatcctcagctcttctacactctccagcacatccttcaccttcggtgatgacaccatttatttagcccaggcaggcggcacttttgatttctagttgcctgtcgatgatccgctgaattgactacaacggtatctgagaagatattaccatgacgattgattcactcgcatgtttcggcacagttcgctaacctcgaattttgtgtttagtgctttgaatattatcttccagtagcggtttccaggatggccactccagtaaccagcgtggacaagcctgtggctatcgagtcagggcctgcatcagatgcacgtccgcctcgtgcacctcgacctcctaggccaaacttcagacagattcaccagtttcctcttccggtcaatgtacatcatgttcctcctgtaattcctcataaccctctttctcttataagtgttgttctctcgtacctcacattccttatctccccgcctcgtcaagaagtctactcggcctacttcgacaaagccacctcctctatccatgtcacggatgagaggtccattaatgccttatggcagatgggatttttcggcaagggtagtctcagtcgaagtgaacccagctggctggcgcgagagaaaaaacgaagagggttacataatgggaagaccagcgaggaaatgacaagactgcgacgaacagaacgtcgtgaactgaagctagagcgtgcccggatggagaagctggccattgaagaaagactgaaggcggaggcggctgctagggaatctgctccttctgagcctcttgaccaaggtctccaatcaacacccaccgacgatacgactaatggcacagcggctacaacggagaagttctccttgaagaaggcaaaagaagcacgcgcgctggaggcacggcaggcgcgggaattggctgcgcaaaatgagactcttgctgaacaaaaccaacgcgagacttcgtctaacagcaaatccgtgcgcttctcacccatcgtacaaaagaaagaattcctatccaactcgccctcgtcactacagttgcctgactccgtcgtcgacagcctcgatttagatgactttgcaaatgaggagcatcttcaactctccaatgaagaggcgttcttccttgtctactcgcttggagcattgcaaatctacgattcacccttgaaatccggggaagcccaaccaacctcgccaaccaccacccctgccctcctccgacagttctgccaccactccttccaacccgctcgtgacggctccgcatccctccaacctgatgatcccttcctgatctcctacgccgtctaccaccacttccggtccctcgggtgggttatccgctccggtgtcaaattcggaaccgattacctgctctacaaccgcggaccggtcttctcccacgccgagttcgcagtcatcgtcattccttcctacaatcacccatactggtccgaaacggaagaacggaagaactacacagcagagaagcaggcgaggagttggtggtggatgcactgcgtcagccgtgtacaggcccaggtgttgaagagcttggtcgtctgctatgtcgaagttcctccgccagctgcttcggttgatgatattggggcgctgtttggtcaatacaaggtgcgcgagttcctcgtcaagagatggattccgaaccgcactcgtgattgattgtcttagtttcttcttgggtttgtcccgtcaaggctggggatgtttagggcttcagataccctctctgtaaatatgctgtattgtccatgacttcacaaatgtattatgattgcataatgacccatgaaattatgtctcatcctagattatttccaagacaattagtaaattatttagttcaaataatcagagcacagtgccattgagagtgagtgtctatggtactctctcatggcgctagtctataaatggtaatattacttcaagacacgtgatacgcgtttcgcgttctgacgcctccatttgcatttgcatttatgtaacgcattcgaagtgtcaagctgcgttaaaacaaaatatacggatacagcttcccgtatcaagacatactagacttccctgaccgtatgtcgtcaaaatggaaacccaggacgatagcatcgaccttgcaaagttgcaacgcgacgcgttggggctagtatgtaacgaccctgcagcgtccctctcattggactaactccgacatccccaggagcacgatccgtacctttccagatctacacaaaaaggtaacgagccgaatcacactctttgttacacatcccacaaagtcaacggtgcttccaatggtgacggagtgtgcaacggccaacagttacctccgaaaacaccatcaaacccagcgagccttgtgcaccaataccgaccctctttgtatcgacctcgtcagcatgaaccacgcacaatgatgttcaataaaagtggcaatgaaccgggcatcgtaccaggatcgcaattcggcaacatgagctccgctcctggggatacccaggtcatctctcagtcagtgtacgacaagattatcagacaaaatggggagtccatgcaacaagattatacacaaacgggagccgatggagcgacattgagaacactgtatgagggggacagtggccatatcgacctgctttccgaactggacaccgtgcaccacggaacgaacctctcccaagatgacgatgacaacgacgacgggagcaattccgatccgaacgagtcttctccaatggcttatgcacccgatttattccccgaatcgcaacgattcctagcagaaacacccggaacagtggtgaaaaaaaatgaggcgggtgggacagcagagaccccgagcatctcgcggaatcccctggctagtggcatcgagtcaagtggtgggcttcttgggctgagccaggttttcggagctacccaggccccgtcgtctcccattgtccacggcctgcagacggagcttgtatcggatcgcccgtcgcccaatatcccaattcaatccgctcgtgttgtcaatggtatctcgtcgcctttgatgggcttgccggttcagttcacgagagactcatccgaaccgaatatgaactatatatcgatgaaggaatcgcagaaaaggcgcgataagactttgggggagaggttgactcggtcggccgacaatatccagtcggaccagagtgacaaggaattctataaagagtcgagctttatagaacgtgcacgacgacagcgagagattgacgaggaagctgcggctcaattcgccgggttgagtgctcctgccagatctacatccaatctctccgccagactacggactccctccgagcagcccggtgaacaacaagaccaggaaatgatagaagctgttgccagcgaggaagaaaccgaacaagaggaagatatgcaagtgcccaggtcacaagagcctcctcaatcttcagccgaagaagataaagagaactacgaggggcctccaatggatactgctgctgccgccgccgccgctgccagtgcccacgatcgactatctcaggtacttgggtttgagccgattctctccccatctcgcatgcgagtagacgagcaaccggatgatggcatagctcatggaggctctggtagtcagccgaacggtgctacaagttcttcccaggccatggtgaaagactctcaaccatcacctcagtcatcggcaaagctcatagaacccgaaattactaggaaaattactcatcggtcgccttcgcgttcgcatatgaattctcctactcgagaccttccctcctctccctgctcgcgaccacaatcaagacattcgaacagccatactcagagaaatggctccgtatcaaatgaatatgccatccaacatgttcagactactgctcttaacgagaatataccaacatactctagcaacccctcggagcagcaacatctaaactcatcgcattccagggtggaagcgggaacttcgggcaactcatcatcgatgccatcccgtgtggctgagacacctatgaatcaacgtcttaagcatctcggtgacatggctcgattgacgagtatcccagaaacaagtcccagtcactcccagtgcaattccgtggctgggtccaatggtgatggactcaataatgaagacgacgatcttccacctatgttgttcaatgaagtccccagtattcgaaataatcatatccgcccagccggggcaagggcactctcttcgcctctcaaaaagctgttgtccagtccgggcggaggccaacgcagggctttgacagaaattgcgggagatctttccccgcaggtcggggctggaggatttgatatgggtattggaattttcactgctgaggatcgagaattcaaagccctgatcgatggatcgccgactcgaccgaagaaaaaacggcgtggcaacgatggctcgagttacattgcctccgaccctatcatacctttcacccctcgcacacagcccccaaaatccgttgcacctattcgagcaacacaagaacgaccggctcccattcctgaagttccagattcggatgatgtgcctttagtgcaactccccgaaaaagccgtacgaaggcaatcaaagcccccgcgacgagcccctgagaatgtttgggaaatcgagagatcgcctgagcagcccttccgccagagatcaagaattggcaagacttctacctcgatgtctacgcaagggaagtatgtctcagaaaagagatcagtacccccaccaaaggttgtcgttcatagtcgaccaccacctccatcgtcagagctcactgaggtttcatcaacaattgcctcggatgatataattgagtcagaggcgtacagtgtcgatgactcgccgactacgcctcgaccatctcacaccttatcggaaaacaccgtggtcgctccaagtcaggttctttctgtctggatgggtcagaaacgcgcatactatccagcgacatgctttgggacaccgctaggtgtatcacaggttaaatactctgtgaggtttgaggacagtcttcctattgaggtaccgaagggtgccgttaagagatttgagcttcgcgtcggagacgctgtcaagatcgagatggataatattccaaaggtcactcatgtcgttcggggattcgacgacaagcttactaaagaagagttggctaaagccgctgacgatggcctctatcctataaccgacatttacggtcataccactatcatagtcggtcccaagcaacgcaaaagtctgccaaatggagggatgggcaacggcgagaatgtgattaaagtacctatatctcgtgtctatcttgatactatcctgtggaatcaactgaaagatcgcgcgttcacatatcgcccggcgcctgttcaacaagagagcatggtccataccccatccgaaaggtcatccgcgcctgcttcacccagttgtcgcttgtcccgcagccttcaccaaggtagcggaatctttgctggtatggtgtttgccgtatcttacagggaggatgaagcatccaaaaatcgtgtgaccaggttaatcgtcgacaatggcggcactgtattacatgatggatttactgagttattcgagccttcaacaattgtttctgttgatactcccatcaaaggtggagccaaggatgcaggtatcaatagcaagggtctccgacttacagctcttgctgaggaagtcggctttgcttgtttaattgccgatacctattctcggcgagaaaaatacatgcaagcactggcattgaacctcccatgcctgtccgggcggtgggtagaggactgcatcgcccaaggtcgcgtccttgactgggatatctacctcctcccagccggcgactcaatgtacctcaatggagcgacaaaatctagagtcatggctcccaaccctccatccacagcccgcctcaccgaaaccatctccgcacgaaaaaagttgctcgcagggcaatcggtgctcgttgtcatgggccgtgggaaggtcgaggaaaagaggaaagcctacatcttcctgacttacgccctaggggcttcccgggttgagcgtgttcctgatctcggcacggccagcgcattaatagactcgcagtctgatgccggtctgtcgacggactgggactggatctatgttgacgatgcagatcaagctgctgcaaagtcgatgttgacacccaaaccgcagacgccgagaattcacttgttccatgggaagaagcgtaagaggtcgattgcatcgtccactcctacaccccctaatgagccaaaatgtaccgcgagggttgtcggtaatgagtttgtttgccaaagtttgattttaggtcgcttgtttgaggagtgattccttatcttagctattgataccatagtatatcgtatctagtctttaatggaactatttagactcacatttacctacaaataaatgtattcaaaatcaacaggacgaaactcatttggtatctctattctcgaaggaagccaatacaacgttatttgagtaatcagcgagtcataccaggagtggtctctgtggtgtcagatagccgctcagtagcagggataggctccgggatacctggctcacgagaggtatcgtgcatgtctccaactgccggctctttgcctttgagtgatcgttgactcggctctacagccaaatcatgctcggctgtagatataggctctggtgcatttgacgtaggtgcatcgtgggtgttggatatttcagggtctccagctgcttcctctgtagctagctcagtgcctggcttactttcagtagccggtgttgtctcctgatcttctcgctcaggggatacactttgggaatctccgacgggtggttccgctgttccaggtgtctgctctgcgcttgactcgacagctgctaactgattatccccagacgccaagataccctgtgattgcccgtcgggtggttgcatagaagcctggggattttgttcgcccgactgctcgatgccctccggggctggttccacaggtccttcgacacggaagaagtccccgttcaaaaccttgatgagggcttccgcttcaggtggtggtggaatcgatccgctcagcagctcctttgctcggatttcccgcccatacaactttttgtttgcatctgctcgctctccaagaacaccaccctcgactgtaagaccgccgtataatccacgggtcttagagtaggcgaacaccccagttgcgcccttcgtacccactactcccccagcctcggcactacgaccaataggcccgacggccatagatatattcccaccaagagtcaagtttcccgcctgcatgaatgtcttcactgctgcatcggtagtcagaacgaacacgaaatcggtcaattctgcgccaaattgaccaccggcgccgacgccgcccattgccatggctgacggggcggaccaactgccatctgggagacgggcgacaatcagtcccgagccaaagcgtattgagcccaggaatccaagtctgagcgctgtgaagacggcgattccctagcatagaatgagtcgggtctgtttgggtcgtttcacggtaggatatctcttaccttggctcctacgaatatcttacgtgggatttttccatcgatcttgagtttcgggttggtgaaggattcgagaatcgcagcggcctttttgcactcgcctgtggaacatggtcagcctagagtcagctatgtggggtagcagtagcacggaggatgatactagatagtgaggcaggcaacgggctgtgcaacgggttcttcatggcatgtatcttttctctcgctttgtgatgtgctttgcaacaagatgtctacgtctacgcaaatttaagtgatgttgttctcacaaggtcgtatatcaggggttggcgtttaacttaaattgcgcacggacgtttcacgaggttggtatacttcgcgattgtacggagttacaggagtggacatggagtttcacaggttcatcggatttctaagtaattctatgcataatttagaggttcacacctctatctggcaaaatgttagctatgttacactgaattgattcggaagaatgaaactgccaagtatcaagggcctcgtatgatgaaacatgtagcgagatatatctattatgttacctaacccatatccaatgacccagagacatagtcatagtggaatcacgaatcccaatgtttatgtgcggcttgatgaattacaaattatgtagtttgcttggtagatcatccagggagggtttatgcaagatatagtttcatatcacgcgtcgaaagtaggtagctgcggtgagaatataatattctcggaggaactatcgcactctctatgatctatctacacatgtaatgtaacattgaaattgaggcgaatcaggaataaagttcgtccagagcatccatggataaggctgacgggccgcggttatgcttaattttcgagccagctgcacttagggcttacctagggaaaggggtacccggccaacgggtttgggccgtgcatttggccggttaagccgggccgtaattacctcaatactattatgaaacccaaatacaatgtctcaaggctggaagatcttcggaaataagcctactctagtgcaacagttgcaatagtcctgctgagagttgtacatatcggctccatttcgctacaacatacacatcttgcctcaagtccccagcggttggaccattattcccgatgctgttccagaccactctagtacttctcgtacttcagacgactagcgtggcatctgtgtccttgaggcgaggagcgattcccctcaccgttaaaacattcgattatgtggtcgttggtggtggtaccgctggaagcgtgatggcgacgcgattagcacagaacgacttcgaagtcgccttgatcgaagctgggggacactacgagcttgagtccctggcggagtttcctgcagcggatgcgttgtcgatgggatcagatcccactttcagctcaccagaggattggggctttgtggcaagagatcaatcgggtgccaacgggcggtcgattcatttcgcccgaggaaaatgccttgggggatcgtaggtatctctttccaagtctagcatatcagatcaaaactaatttctttgcaggtcagcgttgaatttcatggtttaccaacggtaaagccccatgaaaactaaatgcttaggctggaataaccggacatgcagtccaacacgcgaatctatggacgtatgggcaactacagtcaacgacagcagttacgaattcgacgaagtactctcattctataagaagagtgttcagttctcgcccccaaataccgactatagggttcagaatgcttccgccgacttcgatgtcgatgcctacgactcggatggtggcccattgcaggtgtcgtatgctaactttgccgagcctttttcgtcatggatgagcctcggtatggaagctatcggcattgatcaggcaaaggactttgtccagggtaatataatgggagcccagtattgcgcatcaaccattgacccagccaacgagctccgaagcagctccgagcaatctttcctatccaagatcaggcccaaatcactgaccacctatacaaatactcttgccaagaaggtggtctttgatgaaaataatagagcaacaggagttcaagtgaaaggattgctgggtgatcttgtcgtcatttcggcatcggaggaggttatcatctctgccggtgcctttcagtccccccagctccttatggtgtctggcattggccccatcgctcatttagaagagcatggaatcgacgttatagccgatcgaccaggggttggtcagaacatgtgggatcaccccttctttgctccttcttaccgggtgcgagtgacaacattcactaaatttgctactgacctgatgtacgcggctggccaaattgccaaaatgttactcaacaaaaaaggagtcgtcacaaatccaatcgcagatttcctggcctgggagaagattcctcgattcttgagcgaggaattctccgaggaaacgaagagtaaactggccaattttccatccgactggcctgaagcagaggtgagagacattctatcagatatagagaaaggctgctaacacggagattcctagtacatgtctggtgcagggtatatgggcaacgtgtcaaacctcctggcaatacagccaaaagatggatatcagtacgcctcgatactcggtgttctgattacacccatgtcccgaggaaatgtcaccttgaagtccgcagacacctcagatctaccagtgattaatcccaattggctcgatgatgaggctgatcaggaagttgcaattgccatgttcaagcgaatacgccaggctttccagagtgaagctatgcagcccgtggtcattggcgaggagtacaaccccgggccccatgtccgttctgatgatcaggtcctcgagtttatcaagaataatgtgatgaccctgtggcatccgagttgtacttgcaagatgggaacttccgacgatgatatggccgtggttgattcccaggctcgggtttatggagtggatggactgcgcgtagttgacgctagcatatttcctttccttcctcctggtcatcctcagtcgacggtttgtaggtttctctcagtactgctctgatttgttctccagtgctaaccgtgtcacagacatgcttgccgagaagatcgcagcggaaattattcgggattcctaagcgccctaaaacagtttcagaggttaacacaaatattatccgatgacttgcgacgtctcgttataaattgatatgtagataataaataagcctgttttttggtcttcctgggttgtgcttacccaaccctggaagcgatgccatgaaacatgggcttgaacatggcaattgtgcccgtatctctaaaagagaggaagaaataaggaattgggaaagttgatgggtaaatgctcttcctataatacagtaaacaccagatacaatcctcatatcgctacagaaacccataagttattggaacaagacatcatgcacacggaaaatgccctcatttcttggctgtcttcttcttgcccttcaaactcttcagctgagcagcccgttcggctctctgctgacgcttcctccacgccaaccaacggttaccacgatcatgggccatagctgtgatgccggccttctcagcggcccgaccaatttcccaattagcctcacggtacatgtaaccggggcggagctgggggccagactcggcttccacagccgcgacatccgtcacacggacaccgctctcatcaacagaagcaacgagatcagactgagccacaacgcgttccgttatcggcacaggtgccatattcagcttgcgtcggctgggtgcattgcgagggtgcggaagctgctcatccttgtcaaaaacgactccgatataccggcgcttcgagtgcttcagtgggtcgaggtagtagcgcacgtagccggactgtgttgcatagatcgtgtggtcccgtcccattccgcagttctcaccgggaaaccatagcgagccacgctgccggaaaatgatgcatcctgttaccacgtactcgccgcccgagcgcttcgctccgagacgcttaccggccggatcacgggagtgttgattggccgttccttgggaggcgtgtgaggcgtaacgcacttgtgtgaatgggaggagtgcgcgggagagggagggtgttggtgtggttttcgggaatgtggatgttgcggagagagtgcgcaggagggattgcgattgcgagagcgtcggtgtcgaccggattgtcggggtgaaggctcgctccagtgcccgcaggggcgttagcactcgcggcttgaacatggtgggtaattggattgtttggaggtgtagatcgtgaagctccaaaggggaagtttttcgttcggagatcaggcttggcgtcacgtgtgtacccgtaaactggcttcatctatacaccatgcgaactcgttctattttctatacgaatacccgttcattctgctattagtgtcgctgtgatttttgaactatgttgcagagctggcgccaagccatttgggctcttctccttcttgtctctgtcgctcaggcccaattcaacttcttcgaccagatgttcggaggcggcgagcagcaacagcgtcaacaacagcggtcgcagaacgctcccagtgacagtgatcggtaccagcagatgtggaatggaggtaagaatcaaatatctgattgtcgagaacatgccgtcgaaattgcacttgccctcgtgaccacataactgactctttccttacagcacaatgcgaccactacctctgccccggaactcttgcttgtgtccacttcccacaccactgcccatgccctcaccctggtgtcgaggagaaggtcgaacttggagaaggaagtgctatttgtgtgtcgaagggaggattcaaggcgggcgaagctgcgcggaaaattgaattggctcgcaagggtcttttgtgaaaaattcggtctattatctttatgttatcatgtgaatcatgtgcagctgccgatgggttgtgaggtcaagccatggagtttggtgccgctggacggattagtccgataggattgccatgaatctttttggatatgcccagacgtgctcaaaatcggaaagccgacgctgtatatggaaaagaatgcctatattctcatatataacctgataattctacctaacacatgtcaacgagtctactatgtatatgtagacaaggccacttgagatgcgatttctcacgtctggccgagcactcctcggtaatactcataagtagtagagcatggagtaatagattagccagaagactagctgaatatcttgaaaatgaaccgccgtgatctaaatgagggtagtatgaagtacaaccgttataaacgatgtgccgttgctatctccgattatctccgcagtgaccttccgtcatcggtgtttcagcctctcggcgatggagttactacttaccaactttcatcccatcaaccttttgcctcaatctttgtctgtaagataatctggtctttctcggttaatatgtggggttcaaggctccaactcctgcaaaaacagtggacaccagctcgaactcgagctttttcgagcttcagaagtcatggatctcggcgcggtcctcgcaatagcataagaagaccgaatctcatacagacttcgaggaaagcggagccctcacataagaatgagcctgctacttctgagtcccaaggtggcacaagtcccaattatgacccatcgcaaaacactctactttctcccgtttacgtgcctgaagatcccacaggtgtgcttaaagaaacccatccagcagtttcaatactggcgaactcaggaatagtcgtacaacgagaactagagatgatgaatgttctgatgtaagtgcgcaagtgctcatatgcgagaaacatgtgtactgactccttcagtggatttgaacaagcgaataaatatgtcatcatggatgcgcagggaaatcacattggatatatggcagaacaggacaagggattggtgaatacactggcacggcaatggttccgcacccatcgaagttttgtgacacatgtatttgaccgacaacaaaatgaagttcttcgagtaagttcatggaatggccgtcttatagcacttgactgatctagcagttcaatcgcccgttctcttggatcaactcctatatccatgtctataaccctcttgatcaaacgccaaatgcttactcggcgtccacctctcttcaaggcacagcacccggtgctctcattcaacctggcaacttatcgagtgcaaggatatccccacttgatctcggtcaaatgcgagttatcggcgaagcccagcagcagtgggcacctttacggcgaaagtacaatcttttcactcatcagcagtccccaaactcggaaacagacatgggaacccgtaatttctcgctatctgattctggcttatcacgagcacagcagatgcaactgatacgaacacccgaccaacagcagggtcaattcaaccaatttgcctacgttgatgagccctttctatcatgggatttctctctgaaatcagcggacgatcagttaattggatccgtcaatcgaaattttgcaggctttgctcgcgaaatctttacagacaccggtgtctacgcaatgcgaatggattccgcagctctcggcacagaaacatcccacgacaagaagactttgggcatgaccctcgaccaacgtgctgttatgttggctacagctgtaagcattgatttcgattacttcagccgccaccaacgcggccttggtatatttgacttcccgccatatgggttcaatatgggcggccaggcccccgctgaaggtgcagctgcagaaggcgccaccgccggtgaagcaggggccgttggtggagtcgctccagggactcttgagcgagccagaaccgctggcgatgtgccaaatggtatggtttcaggtgctaccaccgcgggtgcaatggctgggtatgaagcgatgcagagggccaacacaaccgacccaaatgccccagcatcggagccggtggacccggcgtcacaaggcttcgaggatcaacctcaagatccttggggtaaggatagtccttggggtgaggaggattcttggggggagaatgacttttggggtgatgatagttcttggggtgacggaggaggtgaatgatgggattgttttgaccggtgatgagggccagtttttgtactataatattcactattagatgcagtagttgttctttaactagacttttgccgttcacctggacattttcccgtcaccctaagaaataggttccccatggcattgccatgccttgtccaccgccccggaattattccatccccactttcattccacccaagtcccccccccgcagatacctcaccacctaagtatttcgaattgcagttttaattcaatcaattaaacagcagagatggcgtcctccgtcgcccagaagcgccttttccacgaatacaagaacctctccaccaacccaccagagggtatcactgcaggccccatctccgaggatgacatgttccattgggaagccctgatccagggccccgaggaaacccccttcgagggcggcgttttcgcagcggagctgaagttcccgcgagactaccccctgagcccgccgactatgaagttcattggaggtggcgtgtggcacccgaacggtacgtaaccgagacaacccaggcgcctggctacttgctcgctttctcaatacacaatggcaaacatcttactggaatttgaattacagtctatcctaacggaaccgtttgcatctccatccttcatccccccggcgatgacccaaaccactacgaacacgcatcggagcgctggtcgcccatccagagcgtggagaagatcctcatctccgttatgagcatgcttgccgagcccaatgacgagagcccggccaacgtcgaggctgctaagatgtggcgcgagcggagacctgagtacgagcagaaggtcagggacgaggtgaagaagggactgggtctgtgagccgggctaggttgcggatcaatgcctcggttttctcgttgctgcgcaggtggatatttgtcaacatggtctgcttgtgctgcgcgggagtcaagatttgatgactggcgttcaagggttcatctttccttatttgcatggcttggatatgcgatggcttttcggtctgtacagtgcattcttatcctcgcattatgatagcggatgaaatacatgcagttctttcgattcactgttctcttctcttgcaactacttgctaaatcttgcatttgctttgggtttctactactacatggcaggtactatggtatatcgtccctgtctttatcttatcacatctattccttcctagatatacagatcgtacagcatcttactcctgccgaaacatcctccgattaatccattcctccaaccccccttggcacccatacaagatctcaatctccgccttcagattcaaaatcagcatccgctgcaattcaacacgccactctggctccggtccatcgctcgcccagacaggactgttccgaagcatggccataatcttcttacggtctcgcgtcgtcagcgagagaagagcggtgtcacctagtacctccggaactgctatgatgtctgacactcgaagacccagccacttcagcctcggtatactaagccgagcattttggtgtagttgtgctgccgagccgtacttgtacgtcgacatgatggccatgccatgggggtcaccatcggtgagggcatagaaacggggcggatgcctgctcgggttggagacggagtcggacattgcacgcaggaacgttcgtgtcatgaaatcggggtatccttttccctgttcgagtacgttgagctcggttgctcgttttggcgacaggatatgctgaagcagagacgcagcttaccgtgaccattattccttctccggccaatgctctggtgtggtaacttattcgcgcgagtcggtggaagactgcctgtgaacagggtgtgaacagggactcagcgtactggtactgcatatgtggtctctccatgcctcatacctctttttcgatgaccagtacccagcgcactcttgaaatatcaatctcgtctccgtcttcgatgcgaggaatcaaactgtcctcggtgacagactgcgcatcgatcaaaatatgggagccacggatcaaacgaaaatctcccgtcaccagtccttttgctgccgcttcctagaaagtggtgcacgaggtcagcaggttgacttcgcagtgatattcccagaggatccagcaggactaaccacattcaatgccgttctgttcactccgatggtatacgccaggtcatcgacaatgcggtccacggtacactgcacgcggaagaattccgggtcgatgtagtatatgtctctggtgattgtatgggtgtgttcagcataccttccagaccggttcctagacattgtcagctcacctcttggagattagctggcccgttcgaatagcttggtccaatatagctaggattcgaaggatgacggctatcagaagacgcagactcggtcagtttatcatctaagaatgatacctaggttgtgttcggatcatggtaggaaagagcttactgaatttccaggcctcatgtgccgtctttcctggccaagagtatttcctgtatgtttcaactctaggactcgcttccaatgccccgttgatggggttgatgatgcaggcaattgggctggctctgcgcttgagggtgatggagatgcttgcctctgccggggactgtgagagtccgtggatgagggctgcgagggtcttgtcgatgaattcttgggctgagggatctcgaccatcgtctattttcaaagtgtgaatgattgatggctcaaccattgccattggagtgggttgggcaaggtgaggatgttctgggtttgaaggataaatgtatctacccgtgcaccgcctgagcataatgcttacatgacactttccatagcatatccagatgaatctgtcatttgaacggtgagttttatataaatagggattcggttcattgctagtaaaaagaagcctttaacttgctatgacttgatcaatagaggtcagaagggttactgtatgtcgaagatttccatctccttcttctcgtcgaatctagaatttatgaatctagaatttattgccttgagcatctgtacgctgaatagtttcttttggtctgcatatcttttctttgaggtctgaggttcttgaagttagttgtatagacctcgggatgccaggccacaccaccactaccactaccgcaccaccataggcccctatcttttgatcagaacatccttgataccttcatcctcctcttcattcttcttctttcaatcaattgttttcctggcctcatatgatgtaaaacattcttcattctacaccgcagtcgtgatactgatgactaagcttccccggtttcccccgtgccttagctcctgagctggttatcgtctttactaggttggcgaaaagatccaattcctcatatcatgtcttctactcctcatattgggccgtggagaacaccagctgatggtcatctcaccccagatgccaatggagatcttaagaccgattactcgcgctggcgattgctcgatgaggaaggccgtcagacatggcggtatctcgaatccgatgtggaaaaccaagaatggccgcagtcagtagctgataaatatcatctgggattgccaacagtatttaaccctcattgacaaaaatctaaatcctccaatttaacggcgcattatagggtcttccagagctgccacaggccaagacgccattggaagctgccgagaatgggctttcattcttctcgcatctgcaactggagcccggaaactgggcttgcgagtacggtggccctatgttcttgctgccaggtattttgattacttactatgtgaccaatacccctattccccctgagtatgcaacggagatcaagcgatacctgtttgcccgtcagcacccagaggatggtggatggggtctgcacatcgaaggccacagctctgtattcggtacttgtatgaactatgtggcactgcgcttgatcggtgtcagcgaagaggacccgcgcatgatcaaagcccggggccttttgcataaatttggaggtgcgatctacggtcctcattgggctaagttctggctcagcattctgggagtgatggagtgggagggtgtcaacccagttccccctgagatttggttggttcacgcattgcaacctgtacaacctctcttttattaaccgactacataggcttcttcccgactgggttccctttgctccttggcggtggtggattcatatgcgccaggtgttcctcccaatgtcttggctgtggtctaaacaatggtctcaccctccagatgacttgacaagacaactgcgcgaagagttatacacccagccatacagctctgtcgattttgctgcgcatcgcaattcaatccacgaggtggacaattactaccccaagacgtggctgttgaatacagccaatgaactgttggttcgggtctggaacccttaccttcgaccccccagtattgttaagcgagctgaggaatggacctgggaattgattcgcatggaagacgaaaacaccaaatatgcggggctgggacccgtcaacaatccaatgaacatggtggcttgctttatccacgacggccctgacagttactccgtccgccaacacagggagcggttgaatgactatatgtgggtaaagagcgagggcatgctcgcaaacggcaccaatggcgttcaagtttgggatacggcattcatcacccaggcggtcgtcgttgctggtttcgccgacgatcccaaatggcgaccgatgttgactaaagctctcgaattcctcgaagaccatcaattacgagagaacgtgccagatcaagagaaatgttaccgccaacaccgcaagggtgcttggccattcagtaccaaggaccaaggctacacagttagtgattgcaccgccgagggtctccgttcaacactccagctgcaggagatgcacggcttccccaagctgatctccgaacaacggttgaaggacgctgtcgactgtctcttgctcatgcaaaacccaagcggcggcttctccgagtatgaaattacccgcgcttcacccaaggtcgagtggctcaatgccgcagaggtcttcggcggaatcatgatcagctacgaccaccccgaatgcacaacggcatctgttacggctctgtcactcttcagcaaattctaccccgaatatcgcgccgacgaaatccgcgccgcgaagcagaaggctgtcagccacatcaagcacgtacagcgtgccgacgggagctggtatggctcttggggaatctgcttcacctacgcggcgttgttcgcgctagaaagtctggccagcgtcggcgagacatatgaaacgagcgccgactctcgtcggggctgtgacttcctgatcgagaagcagcaggcggatggtggctggggcgagtcataccttagtagctcaactcaccagtatgttcagcacgagaagtcccaggtgtgccagactgcctggtctcttcttgggctaatggaagcgggctacccgcacaaagagccgttggagaggggcatcaagctgttgatgtctcgccagcagcggaatggcgagtggctgcaggaagcaatcgagggagtattcaaccagtcttggtaagcttgagctgtcctgatcttctggatttgatttactaacagtaattctagcatgatctcctatcccaactacaagttctactggcctatccgtgccttgggcttgtatagtaagaagttcggcaatgcagagctcgtgtaaaactagggaaaataatactttacagaaatgtatctaatcaataataacgtgcattgagctggtattgacttggtacatgttgtatctcttgttttctctcatcttcccaaatgcaacatccaccccttcctcgttgtggaggagtacaacacgtgaccatccaaaatgatcaacagaagcttgggccactgcggctccttgaaacccccacgattgtttgcgattgctttcattcgaaccaaccacgtccgtcagaccctgataccatcaccatgaatgctgcagctcagggtgacaaggcctcggccgaatccaactaccccatcgctatcgaacactacacccatgccttgagcgagctaccccgcgctccggcatactacatctcacgatcgactgcctattcgcgcctcaagcccgcaaatggcggacccaactatcaggccgcactcgaagatgccgaaatcgcgctccagctcgccaaagagcggggaaaccgcgagtttatcctctccgctcagatgcgccgtgccgtgtcgctgtaccagcttgagcggtatggagacgcaggatttgtgtttgaaattattgctgataaaaccaagagcgagcaaccgctagcgaatagatccgaacaggtgcaagctgccatgggaggaccaggatctgcgtcgaagggcgccagaaacaactacagcgcccaattgccgatttggaccgccaaaattcaacggaagctagcagagttacccaaggacgacccgaagtgcactgtatctgttaccgagttcccgtcttccgtatacgttccgactggagacgagatgaaggctcagtggaaggccctcaaggctggcaacgtgggagtagccggagcctcgcagactaagacacagccggcagagccccagcagccatccgcagaagagtctggttcaactgctcgacttccagactcgagctccgctgcagctgtttctgttgccccggagaaggttcgccatgagtggtaccagtcacaggactccgtggttgtgactctttatgccaaggggatcccaaaggacagtgtcgcagtcgacctgaaagaggatttggtaagcgatattctgtctggccatgattggactttggactaattctaaaacagatctcgctacaattccccctcccatctggctctgaatacgactttaccctcgacccgctctatgcagctatcaatcctgccgagtccaaggtctcagttaaaggcaccaagatcgaactcactctgcgaaagcagaaagccggccaaaaatggggtgccctcgagggctcagccaccaaccccgccgagatcaccgaccgtccagcggcgcaaacctcgccggctcccacgggtccttcgtatcctacctcctcacgcagcggccccaaggattgggacaaagtcgcgtcgtcacttactgcgaaaccaaaggctgatggaaacgcagacgtatcggatgacgaaggtggtgatgctgtggacgggttcttcaagaagctgtatgccggcgctgacccagagacgcgccgcgctatgattaaaagctacaccgaaagccagggaacatcgctgagcacgaactggtctgaggtcgcgaaggggaaggtggaagcccaccctgaatgattatctacttgctattttctgtcttctgctctaagccgcatgtagcgaggtgtttcctgggtattttagcttagttctcaatttaccgtctcttctcaagttgtttattaatactggttcagcaagtagttcaatttgtcgacaaccaaggctaccccactctatagacgagacaccacagtcgtcccatccccataaagcggaatagcagacccagctccatcctggcggcgcatcgtagccatgacagtcccacccacgaccttcaaagaaaacttcgccccttcttcactgggccaattcatgaaagattccccgtcataaacttgctcgaagatcctcgccggcttgatcctctgcataatcggcgaaatacactgtcctttatcggcgttttcctgctcgtacacagtccacacattcaccggcttgttgccgaagagcgatttgttcgcattgtagagcgcacagagagcttctgccgcagggatctcgcgagccccgtccgaggaagtgttggagagcagaaagccttcctcgttgacgattgccgtgacagagcaggtgccgagtttgtcggcctcgaccgcgtcgaagtcggcccatcggcccattttggtcgtatcggcgtgcactattctccgatgtcttatagcggaaggcatggtggttggatgtttggtaaaagagaaaggagtagatagattgtcttgggtgatgaggtaggtgtttgtgtttgtggatggtattttgctaatgcttgtttcgtatttgggttgactggattattctttccatggtgcgattgagtcggagtatatatacacatttatcactgccctgagaatcccatctggaaaattgggctggaatcaaggctgcaaagaacgaaacccaacacagcagcaacccgccatataattgttggctggtaaggttccacgggcgttatagaccggggtattgtgataagggatcgccggcactaagacgaatgaaattaggttccaagtcagcttagggctgcaagtagctatacaaaagcaaaatgataggctgtcggcgcttagcgctctcgtgaaacttatattggcgccggccccctaaacctcccaactttcgccgatccctgtcctgcatgccataactctgcccaagtacggttggataggcttcttagtctgtttacatcgagacacctgcatcattgacggggatggttggcccggaggtaaagccacgtctccgccagcctgattgagcgaatagatcccctcacttgcaaagtgatgctacaggcatgaatacgatatacaattattggaagtgttccaggcctcaggtgctgacattctacccatgtattcggtagttcatggctggaacgacccattcgcggatccgcgacccctgcttcatggcaaacatttcccccgcctagtaagctgaacctgtaagctaggaatgactgaccgctagtttagctttcatcatacgaggcgcgaagtctgtccaacgtacgttggctctgttggttcgtgtttggtcggctcttcccggctcaggcaatcattggagggctgtattatggctcatcgacgccaatttacggacaggactttgttggaaacgatgtatcgattgcttctaggattttcggaacttgttggcactgctagggtccagttgccatatatccatgtccaagtggtggcgtatccaacgcagtcatgagggaggcgatgtgacttggcttgcagctctttcgagctatctattttacatttttgagatatgcttcgtactaataaacatgcaatgatatccaatcatatcagaacctcattgttggtagccaggtcaccaacgcagggaggaatgtgtcacatccgggtacaagaaccaacaaattgagcttgttttctgtttgctccaagtaatgatggcttatagaatcaaaacagtcttgggcagaaaatatccaacgaatattcccgccgttggtgtgaaggacaagaatgggatagcgtgggcggttatttctgagaacgtgcatccccgtgtttccttctgataattgttctgattattcttccgagtcagtgatcagtggacatatgctcatttccggtgattaactcgttgagttgccaagtttgtgtgtttctatagttgttccttatgttgccttacttctttcatgcccttgagctagtatcgctttcaacttgtttttttttttctgctaaaagtcgtaaaatgtatttcgaacctttgtatatgtccaataaatcacataaactttgagtttactcttcctcttcctcgcccttgctatcgcggtataggaaaaattgtataaagatcgccatatccagcagcagcgtaccagcgctgccaatcagccacgacaagttcaccaatacataccggccatacagcgcagccgcctcgccaggacgacaatgcgcacggtggctgtgatggcccaggacctcctcagtcgacccaccatggcaaacaggcgagtatgccataatagaaagcacataagtcaagtttccaatgcaagcaaagaggaagaacagcagggaaacaccatccgttgatttgcggcggtagttcaagagaagctggggcagacgtgatccaaggtacaaagctgcacagaaatagccgaatacttgacccagaacatccatggtgataggttccgggtctggcgatgctggctttgctgccgggctgacgaaccagcccaccacgcctgcagcacagactagagcgacggccgtgaagttgaaaaggatggactggaggacggagatgcggcgacgacgagcgagttgagcacggcggcgcgcacaatcggaagtgggttcgaagaagggcgttgcgggtgacagatgggtggcatccaccgaggagaagatatcatggaaagagtttgtcgagtgccgtcgtccggcggacggcatttgtgtatggtcttcgggttgctgtcccgctacgtttgtagccgggtcctggatttggacatggccgttgggctttggaataagggatgatctctctgttggcgctggttcatgttcggcactattccgctcctcgtcggaagtaccgttggctgcaaaaaggtccggtgtggcggatggagatagctcctccttgaggttgaatccccggtaatagaagcactgtcccagcagaacaatatctgctaaagtgtagtatactgcaaggatgatcatggtaggaagcacgccttgtaggacggcaccaaggatgttgaacacatcgccagccaaccagatgatgaggaagatgagagagaggccatctgcagagccacgtcggaagttctcgatgatttgaggggagaagacgacaacccaacaggcaatagagattgatctaaatgagttagtattggactaagaaacaaaacatacagatatcgccagtcttagtaaatatagatccaacgtcgcacatgtattaaatgaacatgacatctaacgaaaaacaccaaagaaggaaaaaagagcagacttacccacagatgccgctaagggcctcgatgttcaaattagccgcctgcgagggaaacatgatgcaggtgaaccgtgcgattcagagtcaagtgattctgaatggtttgggaggcgaaacaaggtaaaaagtagaattcccagtataaatgaatatattctctggaagatccgactctgtccaagtcgaaaatagggcaattggaggtgcgcgaagagaattggagaaattcacagacggagccatggatgacgtctggtcacgtgcatgggagtatacaaattagggcagggcatttcttcttgtttccttcatttatttcatttccagcagtttatgaagatacgggttagataaggtgatattcccttcaccatggactaccaattcagagctattgacacaatccttactgtggtcacatgatctgcgtcgttaatagttgccacattggcgcccttgagcatccgtaccgctactatagcaaaccatgacactattgtcctttcataagcagctctaacttgtcctgggcatcacagaaaatatttatagccttcgtctctgtcagcaaagctcgaaattgatcaatgtatccatccttacctcggtcagcttaatctgactagcaccacccaggtcgcgggcaaatctgatctggtagtttccaggatcgctgatgagagagtactcctgcgccgggattggaagtgtcggctcaatatcaagtagcgacttgacatctcctacataaggctgagtcaactgtgtcaacagacctggcgagatagtgaggtgatccaccccagcgaggcagaagatctcctcgacggaagtcaagctagcagggagaactttggtgggcgaattgatggacttatagtatttctgaatggctgcgcaaagcgggagcaatttcgcattgtccacaaatctgaaatgagagtgttaggtaggatatcggagaagagtttggtacttaccctgcttgtacatgcaccctcagttcgttcacataaggtgcgatataagtacagccgacctcagctgcgagcacagcttgagccatgctgaacaaagtggttgctaaagtatgcacaccggctgcttcaagagtgtggcaggccatcattccttcccacgtactaggaatcttgatagagatgcgactgacgtcgaagccgggctggacataatggaacaactgcaaaattcctataaatgatctgatcaacatcggctcaattgagcaaaatcaatgacaatgagaaaagttaaacatacggaatgcattggccgcaatcttctccgatgagtatgagtagtaaggattaacctggacatgaacacgtccacgaatatgttttgccattccaacggccaatctaacagtctattaatcgatattagtcgacttctttaagcccatcaatgctacaatcgaagcatgacttaccgcaatctcgacagccaattcttcgaccgtggttgacgagtagttcggatgcagtttcttcgcatctgcctgtgccgccgcaatgacttcagcccgtgctggcttagaaagctcgccaagtgcaatagcctgagcggttagttgtaacctggttatgtagtatcttcgacctgcttacttggttggaagtacagtcctcgaatggacccagggttttggcgacttaaaaatagtcaattatctgaaaaagatcatataataatctctacgatgtggactcaccttcgtcgtctagcgtatcacagtcgatctgcgtgcgcgaacgcatatagtcgagacctgtctgtactgccatattcaatgtaggtagactagtaacgagacaagtagtcgagtaaagaaagggtgtctgatggagagaaaggaaaaacaaagcgaggaaatggtcatcccacttaccccaaccctatagtgcatttaatggggggttttccggggaaactccgcaggtggcacggatttgtcggcccgagtgacttgacactgcatcgagcactgcatgtctattgtagtgcatgggtaatgtgctaggaagtatgacagtatgagagctgggttaagttcagtgcaagtttatatgtcataacaattagtataactataacaaatcgagggatgaatgatgcttaaagtatcccaatcagacaatattcgcattgtataagataagaaggatatatgccgagagaaacgcctcgcgatgcaaagtggaaacccaccccgtataactatcaaactagatatcaaaaatcaaaatactctcttttgtttggcttctatttggcctggttagccaaccacgcctcatgtgccttcttctggcgttcccagtctttgcggagcttcttcgcccggctcttagtgatctcctcgccggtactatcgcgggtaggcatgccttcatcgtcccaggcgctgtactcgttggtacggaacatctccaggtggctcagtttgcccttctccgccttcttgagagcctcctgctccttcttcagcttttcagcctgcttttggagagcccgagtttccttctctgcccgcaccttaatcatctcttgggtgactggccggactagggcaggttggttctcccgatcttcgagggcgataccaacatcgaagaggtcgatgtctcgcacacggtcgcacagggacagaatatccttgccaatagaatcagatgactccaaagacaccaccttgtcacggaagttggagaaaagctcagcgtatggcttggcagattcagaggcctcttggggtgccgatgcttgggcaactgccgcctggatatccttggcggatattccagccttggaccgtgcggcttcacggagcgtgtcacgcatagccgacagagggtacaggtagggtttggcctcctcgggaatctcaataccagaccagccgatttcagtgctgtcagcagaggcggtgccgttaagaccgaagatgttcaccatggaggtaacccattgggctgcagcttggacatccttggagggcacggtagccttgtcggcaatattgaacttagagataagttccgaaatcgacgccatggcagcgggagtgttgaatgaatcacagagctgatcgtagaccgccttcttggcagcttccagatcagcagcaaaggtggtgtcggtgccggacgactggagagctgcagggtcgttcaccttgaggaaaaagttgttcaccttctcctcccatgagctgcctgtgtttatcaaatcctctgtgatctcaacgccatccttccagccacccaggaggaaaacaatgcgcagacttctcggcgaccagtctttgcgatcaagcgcttctcggatggtagtgaagttcttcaacgacttggacatcttggatccttggatggacagatggcccatgtgaaggaagtagttaacccattggtcattcttgtggtcaccgtgccagtatgcctcactctgggctagctcattgtcgtggtgcgggaaggcaagatcaatgccacctgagtgaatatccatatgtttgcctagcctggctgatgccatagctgagcattcgatgtgccaaccagggcgacccttgccccaggtacttgaccagcttggctcacctggcttcgacgacttccagagagcgaaatcggaagcaccacgcttctctgtcgttttgctggccaaagatccttcgccctctgcagccaacttgttgtccgaccggctccatggctcaagccgtgcgtacggatgacccgcagcttcgaaggcattgatatcaaagtataccgatccatcctttgtagcatatccgaagttattcttaacaatgcgatccacgaaggccgcaatctcatcaccgtattctgtcacgcgagtcaactcggtaggatcaagaacgttcaggtcccgcatatccttagtgaaccggtcctcatatctcttagtcaacttggtgaagatgctgtgatcgtccgcatcaaccaatgcgcccttcagggcatcgaggtaaggcaaaataagatcttgcgcgttcgaatagaacgactcagcaaagagagcagggtctgcactcgagctatcacgggcttccgcctgcacgattacttttgcggcagaagaagccgtcttgatgtgcatcttaaccttggcctcggcatcacctgccttgtcgtttcctggcaaagttccaccgttcaaaatagtcgcataggttttctcaacctcattctggtactgcgacggagggagttcggagtcgagcaagggaaggttcttctttaagtaggcgacgaaagcgcttttgacggtatctaggacctccgaggtaatcgtagggttggcggcgacaaattcattaaacaggtgttgttgtctggcgcggaggatgatctataagattggtgagtcaccgtgcttgaggctgtatacacagctccgagccataccttatcgtccacgtctgtaatgttcataacaaatttgacgtcaaacttgaagtagtcgcgcataattcgccggataatatcggtgctaacatagtttcgggcatgtccaagatgcgcgtcgtcgtaaacagtcggtccgcacgcgtaccatacaaccttcttgcccgcagggtcgatcgggatgaagggggtcttggacttggtcaacgagttccataccttcaatggaggcagttgcgcgtccgggctagcgaccggttgccgccatggcggctgctggcgagaagacatagaactgaaagaagtgcctgacaataagaaccgctgtttgaacggtggaaagaaacgaaaggaaagaagggcgggtcgggggaagagcataaagagggaaacaaaggcaatggagggggaggggctcttgtcaggaccagatcgagtcatccatcaactgcggactggctgtgattggcggcaacgggggatgggaggaccaagccctgagccctaattcgtggcccaatcaggcaataggcatgacagcctttttttcttggagagacagcgagttccaaccgcaagttagggattgtccgtaccaattatccgcgctgatatcgcccgccatgacttccccattccttacccggaacgccgtagcggatgcagatagtcttgccctcttgcaactccgtcgcgaccagatcattccgacgatcctccgcgaccatgacgatgagaaccaaggctattgggaaggcaaggtcaccaacacccgcttcggctcattcccacacagcactctgatcgggcaaccgtggggcgcgcagattgtcgcgtcaaaagttgatacaggctcgcgcggtcgcccatccaccaagcgcaaggccgaagagctcgatgctgagacaacaactggcgcagaggaggacaagaagcgaccatcattaagagcccccgtgtctgcggatagtgggttcctacacatcctcgccccgactcccgaagcgtggaccctgtctcttccacaccgcacgcaggtcgtctacaccccagactacagctacatcctccaccgactccgcgtacgaccggggtgtacagtcatcgaagccggagccggcagcggctcgttcacgcacgcctctgcacgcgccgttttcaacgggtatcccgggacagaagaagcaaccaaacggcgacgactggggaaggtatgcagtttcgaattccacgaagggcgcgcggccaaagtgcagcaagaacttaaagaccacggtctcgacgggattgtggaggctacacatcgcgacgtttacgaggacggattcctgctgggcgatcccaaaaccggcaaatcgcccaaggctaacgccatcttcctggatctccctgctccctggctcgcactgaaacatctcgtgcgaaatccgcccccggggcaggaatcagctctcgaccctgagtcacccgcttatatttgcacattctcgccctgtctcgagcaggcagagcgtacaatccgcactatgcgcaagctatcatggctcaatatttcaatggtagaagtcgctcagcgtcggcttgatgtcaagcgggatcgtgtcgggctagataccgagggcgttcgcggagctacaatgtttcctaagacggtcgaggaggcagttgcaaagctccgtagtgatgaacaacgtgccaagctcatccgggagaatcggatgaccaaaggccagccagattaccagccaattgcgaaggagacgccgttctataaagagaagaccgatgtccccgtttatgctcagggtcgtttgactcatcgatcggagccggacctcagaactcacacctcatacctggtctttgcgatcctgcctcgggcttggtctgaagaggaggagcaaaagtgccgggatcaatggccatccgccaaggtcgcgaagcccgataatgagccgaagacaagcaagaagcaaatgaagagagatgcggcagtggaacgggcaaggcttcgcgacgaacaaaagcaattggaagaaaagtcacagctagaatcgggagataagatcgaggaagaaaagttggaaaaggagagcaccgaggcatgaggatgaagataccagttgatttgatttgttagcataagattcatagccggattgtggtattgttgtctttgaagacattctacttcacacatatcatttactcaaaggctctttcatcattgaattgtacgcaatcctggagctaggttggtcgtcaactcctccgacctcaaaccagcatttgcaaatccttacagaggcatactttagcggcaagtatgaattcatgggcgcatcttgactgaagcagctggtatgagaagttttgcccgagaagcagccgtcttgcaggccacctggagacgaacatagatcacgatgataaacaagcagcgagaatgagtactacaagggatcagaaacacaaagaaggcaacgctcatatgtaattctctatgggacaaaaatgctatcaaggccccttctaggtaatggaatcgtgaaatgcaacaagcgaaatgaccatgagtagatggtatgaacaggaatataggagctctcagaggttattttcagctctgaacttgtcccaggcttcatttagggttccaaacacagatccagcaatcatacgctgctcagtggtggcactggtagagatctaatatggaacgttagtatataatctgccaataccacctaagaaggagtaaacataccttatcagggtgcaccttggaaatccccttcatgtactgaatcttaaccttattcggcagcaccagctccgacaagccaatcttcttccacccagcctcgggccatagcacagagtctaagctacccagcagcgcacgcaaattgtcttgcttgccacttttccaggtagagattttcgcgtcgacgctctcggcaagagcaaacttctcttcgtcggcacgctcagccgcctggttggcttgtcgcagacggctgactgcttcaaagtccgtcccggatgccgacgtggccgtgagaccggacataaccgaggccttcttaggcggaggtgaaggccgatttctagcaggggctgtgggtttagattggggcttgttgataccagccgctttctcgcaacggtttcggccttggatgctcgtgctgccaccgtgaccagactctacagccagcttccacgcctgcgctgcatcgttccagtgctctagttgctcaagggcttcggctttacgcatcaaagccttgccgaagaagtctttcataggcttaggtggttccccggtgcaaagatcgattacttccgattcgcccttagatgggccaataaatgttaaaatgatgtcggcgtcatcaatggcggacttgggttcaccgatcttcagggccgtcattgcacgattgctgcggatgataatagtgataggatgtttgtcaggcagcattccaagagcagtggaaaagctctgatgggcttccgcgtagtcgcctcttttgtatgagtctgcggcctttccgcggtgccggtgtgtcgattgaagcgcctcttgggatacaggtggaatagaccgtgttggggctttggggcgtacaggaatggaagctgagcgtgtcgtaggcatggcagagggaggaggctttgaacgactagctgaaggagcgggggaatcaaagagatcgacagtcggctcagaaggcggcggtggcgcctggggtcgcttgcgtctcgcaggactaacatatgcttgagccgtctgctcttcatccttaaaccgtgaaactcgagatttaggatcctgagagcttggtcgggatggacgttggaggaagttgggttgttgccttggctggacagcaccaggggactgttgagtacgaggaggctggcttctcggctcggggtggtgggtttcacggtgacgaggtttctgaggccgaccatcaccagactcaagaagaagcgcttcattggtgaaatcctgctgctctcgttgtgattgagccggctgatcacgacgatctggacgctgcggctgcagaggaggttcatcttgtggcgaggatccatctctcatccaacgcggttggctggggtcatgctcggcgttaaattcgtttaccgcttgttggaatttcttgctgccagtcttccaaagcgagccggctgatttcaacagggtattaccaaattgggaggctaactgcgcaggatctttgtccgctgatgccggactccgtctgtcctgacgtgatcgagattctgacatttcttctctcatccacgaaggcctgtcgcggttgcgactatcgctccttgcagcgcgatcagtagaatgagttgtactgggatgcccttcagtcttctgccgagactcggcatgggcctgggtgagaagccaaccaacagcagcctgcacgtcggtcccggactcggtggtattcaaagcccggcgagctttatccgcggggaatcccatatccaccaactccgcaatagcccggtcgacctcgttggaaggcataggagatgcatcttggtctcgtccttgagttgagggtgtggcagatttaggaggcggttcggggtgagggatatctgatatcggcttcccaagcaaaccaaggaaatcatcatcgtcgccttgttgaggctgaggagcgggagcggatttcggcttcaattgattgagaccgaatggatcatcgtcatcaaaggcgtccatcccccccgtgttgtcctgcatggaaatccccccattggaaggttctgagcgactgttcaagtcgattcgaggcgacgatctcgaggaggtggggattgggaaatgcgtcgatgcgtccaccggtgcggcagaattgaaggcagccaggagatcctcatcgtccgcgggcggaggtgcagatcgaggagcaggtatagatgcggggctccgcgtgcgtccttcgaaattgtcccagaattgattgttctggcctccgtattgcgattcgaatcgactgcgattttcggcttccttcttagccttttcctcctgcaagcgcttctgctgttctataagagataggttcttgttcccggcggaagaattgaatgaaaccaggttcgcgaagctatctccggcgggagtagcgggctttggtgagcttgagcggttcgaggtcgcagataacggtgtggacctgccggagccaccatttgatggtatacttgggtacaaatacccagagctcattggcggtggtttgcttgtgtttgagtcggaggaccaactcaagccatttagatcctccatggtgagtgagcgtcgcaaagaatgaaggtgacgtctggtgggttcgaatgaggattaggtcccagaagcgggatgaaggttttccataatctcaccagctcacaatatataaaagaagcccaacgcggtttcaatgatcgtttgctgctatcaagcagatgcggaacagttgccccctgcatgtgggggatccggaccgcattgaggccagcacgtgattatacatttccttgtctgaggaaatagttatcagttcactcgtctggctattcaatgtcttgagagtgaggttaaacatctcagtaatcaattgcctctaacatgaactaacctagtccaaggtgtatgtgatgacgtcgatgtgagagatatccagtccacagaccttcaactgagcatcttcttggtactacgttttgatttctcaacaactcagtgatcactcaaatcgccctcagtccctaaaacaacctgaggactattaacggatattgccatggccgcttcagccaactgaagtaaacgaacccggtgaaaccgatggttaaatggaaaagaaacaacctcacgatacacatacaacggatgaggaatatatatgtctctatgcataaatgtcaccactgactcaaaacaccccttattaatggaacctgtggcttcattggcctcgttctgatttgttggttttcgtttgagtggtctaatacgtaatgtctgcttcgttctatcttgctatgtatgtcgtgctgatggatatatttgcaggtttgatccccggcaggcgcccttgaatcaccctcagaggtaatggcaaagagaacaaggaggaggaccaggagaggaggtgccagagtcgttgattgcacctgtgggctaatgagcacgattaactcgagaagcacttgtggaaagtgtaggtcttggaggaaatacgtatacatactaatcaagggtgtctacctctacggggtatcccacaaggcccagtcatgaaatagtccagaccattctagagggactgaaaaagaatccaaaagcttacactgtggagaccatcaatattgattggtaaggctatccctgtaaaatgcagtaaaaggttcacaaaagcaggcgtgcttcgtcctgaaaccagtgcttagggtttccacaatgcaaccttttaggtcttttctcggtgcttacttgcaggctgcaagtccactagagttcgaaaatatgccaatgaccactcaatcaactactccgtatatcctacgaaatacctgctgacagtctccaaatcggcaaaaagacgaatcaatagtcgagaaaatcatcgaggcccgaatctaaaaacgctcgacctataggatctaggcatatttgtagggccgaagcctagctaaactatcactcaatcattgaaccaagaatcaggggatcacccggtatccaagactattagctgtagacggggcatgtggtatccatttcttctacttttgggccaacgcacatcctatcccaatgtgggatgcgcaatacttcagcctagaactattttgtcttttctggaaacttcaatcaggggtagttggagacggaaagacccaaataactattccgtaaatggtagcagacatctactcatgttctttcttggtcgtatagatctactattgggtggcatttctacctgccaaactccgttagcttgcgcgctaatgcatgaagctttgctcaattggtgattttcgctaaactctaaacgatttaacgtcatggtttagcggatgatggagcccctttttgacgctttcatggaagacattagtccgttcggtgcttgattgtgtcagtggcgcaattacagcggcaattcagcctccatgtcagctcttggtagaaccatacagagtactccttgggaaattttataggtgcgaatcaaaaagtagcaataagcagtggctgactaagatcaagtgaggttatgtccactcgacgaagatcatcatctcaagcgaatcagacaaagcactgtatgctttgtggctgcaggcaaccaacttggtatgtgatatgatagcgacctcacggccccttcctgaagtctgcggtgtcatactccactagaattggctgctgcacaatatcctgtgggagattccacctgcctaccccggcatcccaagcttctgtctcccctttctggtgcccagtgacaaaagtgcaatatagatctgggtctccaaagaccatgattccgcctccaattcggacatcatcgagtgcgtaattcagggaatccgaatcaaatatagattgcgtcaattctgcgcttgcaattggtctgaaattctacaaatgttttcattagcaaaggcggttcaagcatattctttgccctgaaacagtatcccaggggtatgaggagaatgggcaatctatacctgttcggcacccccgcctggggcgaaaaacctcctaacagtaatgtaccaacgctcttctggtatttttacgtcgtatcccgtgaatctgatatgtgctggtaatctcattttcttggcatgaataacgagagtctagtcggcttccatcgtaggaaggtctgtaggtataggtaatatcccaggttgactcgtgtcatcgacgttcttcaagaactagcctcgctggctaagggaaagctgcttcagtttatcactgtcctagctggagatagaacagaatgaatgatatcgtatcatcctggaacaacacgaaacttgtagagtaggatccagaaacaaaatttcttgtcagaatcgtgactactccgttggggatgaagaaggtcagaagggaatgacttctagatcattctgaatcacgtatgcagggtgatcgatagtcttgacaagttcatcgagtcctgctagccaatagatactagcgtggttgagattagctgctaagctcccatacaagaaaagaagaaaacttactaagctggccatttttgtcaagatgttcttgagtattcaccgggatcataatcccagggtatccttcatcgagagtccatacagggcggaacccgtgcttcgcaaggttgcgatggttgcatactcccgagctagaacggcatcacctttgtcgtaatcagaatctgaagtatccaactcttggtcggggtcttcgtaccttgtatgcttgatggaaggtggattaagtctgtatatatgtgtctggaggagatgaagaaggcgagagtgagaagttagagtgtgagaagtaagagtacaagataagggaagtagcaaacaccatccgatcatggcaccttgaaaggaagtgatgtttgaccatggtagctactcagtgaatccatcagtaatctcacgtttgctaataaatgtactatctaggtatggttgccaaagctaagcttgagtggatgagtggatttcgggaattccgactcttccgccagtcgggaaattacgaagtcctctctttagcgaaatttgttttataatttcagctctcactttagttttgttttttctcgcttgctacaggaccgaaaatgacagcaaaaagacagtaaaaaagatgcatgaagaatacacctacgttgtagaaagaatattaaagatgccgatgacaaggccaatcaggtcacaccttattagacttaattccatctgccgtacatacggagtactccgtactattgccaaagactaggcccacacagggatcttcattggcttgaggatatactcaacggaagaatatttagtaggtgggtataccgtctttgcgggaccgcgttccgaatccggtacgatgtatccaatcgatatgtaatctagaccagaggtcacgaggtcacattgtccaacctcgggaaggaatgtgatcgtgtattatgtaatctggttttttggaatggcagaatcgcggctgaaaaggcggaataaaggattgagccaatagaagtatagcaatcacgtgggcggtaggcttaaaaatacgtccgagagtaaagtttctaaaaccgagggggctaagcctaattcagaagccttggtactctttatggtcaaaagtccaggagcacgaataatccttcgaaagtgatcgttagaaaaagtggggtgattttaacggggtttggcttgattattatattcatctcctgggcgaaacctgcatcatcgtggaaccaaatggacattgagatactgttactccgtagagtaaggtaagagtgttggaatggtactcgtatatgcttgtattgagactatacatagtattcaagtagaggatgtttgcggtaaaaaggaaagtcggaactccgctttttcacagcagcggaaccactcgggaggccgagccgcgcggtagcgaatggaaatccaatcggtggatcgcagtgtcttgcccctgactttcagggcttggacaggtatggcttagtcagtgcgcacaatgctcggacctgtcttaatattgatgtaggtaggatatccttcatactgatgatactctgccagccctcattcttaagaaaaagaagaatgaaaccaaaataatccagatttaagaagatcccaaacgaaaaacagagttaagctgaaacgacccaacagagtggccaggcccgtgcttcccgttagctgggtccttgggtgcattgcggtataaatggggggtaaggggggcttgatggtccggagatgaggcccctaataagtaaataagagtcaagacaatcagactgatcaaggattccaacatcaaagttaatgatccttcgcatagcctgcacggtccactgttctacaagtacggagtacaacatagtaccatgcagaaagaacctgggcctggaatactttacacagacgtccagatattatgtcaaggaggggcagattagggcagattaccaggtgaaacctggtaatctaggcttgagagacgttgtctatggagtaggttcatactatatattaggaagcgacaccttcctcttctagctgataggcgtagtgtgctgaccaggaggcaacatcgaaccgaatcaattctccggttttcggtgtgcgttgtactccccagcacttttttgggaacccccctaactcaaccaccgtctattattaacactcttaattgccaaacccataaaatctccgaacatgcgctcgtttagatatataccaagtgggtttgccctgccgcatcgggtaagccgtgtctttttcttctcgtttctttttttcttctttttttctctcgaacggtacgctagtccgtgcatttccgcgtgcgttccacggattcgccctaaacgtacgttgtatttggtcgttcccctaatagggcatggtctgatcgatgcatgtgagctagcgatctatacacgtaccacccagtggcgcctcggaaccggaagtgatttgatattggcattcctctttatccattcgcctcggccctgattcgctgcccccttgcacaagtcaaatgatagtccgttctcttgctttccgactggtcccctcctcctgattccccatacatacggcaatcgatcctaatctgccctcgggaaatatgtacgcattccgtactctacacaagggctttgtgtgctactgattatgctgttgttaatatgttgtatatgggttgtacggaaggaaatgttcggtactccatagttacccccgtagttctaaaagcaaatcagctactccgtagtctgggcgtatccggtaccgcccttcacatactaaagtaccagttgtggattgtatctggtaccttcccaagcttccgctctcgttctcttactcgattcagacggcgccggactttggactttgccagactcgcccctaaatcgactccataaatattcgaattcgaatattcaaattattaatgcccggacgtctagcccgtgctaagatgacccttcgcgagagctgtccacgccccataaaaaaaaaacaataagtattttacctctttggcctgctttggcctgctttgcctatttttacttagtctaccctagagcctttattatgcgatgttaaaaaaaataaaaataagaaaaacatcacattcagatgtcacttccccctctttgtaaactccttatccgaactacattctcttctccctgcaatccctccccgttgccccctttcaaccctcgacaagcctggggtgaacctcccaactcgataccatggggttattcaagcgcaaagattccaagaactccattcaaagcgataccgagaatgatcccatatcaatcaacagcgctcgtacatcacatacatccctgagatcgccaaggtacaagggaactggcccgccatcctcgatcccggaactccctatcgccagacccccagatccagcattggacccggccgcatatctacggagcatccatgccgtgcgcgaacgctccaacatcattctgaaaaaggccaaaaagaaccaactgcaccatttcgacgtcgacatgagcaaattcgaagctaccgcctcttacgtcgtctccatcatcaaggtagagaaccaaacgactcgatcctgtgagttttgcgctaacgtgtattcccaaccagcgagattatgcgccagattatgagaacattcccccgcatggtcgctggcagcacttcgatgtcggcggcagaccgcgtatcaaccagcttctccagtcctggcccagtcgcattgatgcgcaggagcgcacccgccgtttgattgatctgtttgtcgtgtccgtgctgctcgacgctggcgccgggaacgagtggtcgtaccggtccaaggagtctggtaaagtcttctcgcgcagtgagggcttggccgtggccagtttggagatgttcaagtcggggcttttcagtagcgatccgacggagccatgtcaggtggatggcgcaggattaaaaaaaattacggtcgaggtgcttgccaaggcgatgcagcattctgatgagaatccgttggccggtattgaaggccgcacgggcttgttggtacggctctccgaggcacttaacaatcaagacttcttcggtgtggatgctagaccgggaaatatgctaggtgaggcgatctggtggtgtgtgtttgaacagctactaatctttcagattatcttctcggtcatccgtcaaccctggcttcttccgtacctattgttccgatcaccactttgtggtccgtgcttatggatgggttttctcccatctggccggaatcacggacgcagattgatggagtatctattggagatgcttggaagtgctcggatctccccgattgtcctcctgcaaagcagtgggagagcattgctccatttcacaagctaacccaatggctatgctactcgatcatggttccaatgtcaaaactgatgctcatccacttcgccgggagcgacctcctaacaggccttccggaatatcgaaacggaggcctgcttatcgacctgggactcatgaccttgaaaccggatgatatgcagcgtggaatcgatgcatataaagagaatgctcagatcaagggtcagccaagtgtcgaagtggcaccgctcttctgcgccgacgacgatgtaattgtcgaatggcgagccgcgactgtcgggttcctggatgagctcctagacgaggtcaacgctcagctagggcttaagggctcggacgagccattaacactagcacaaatgcttgaggctggcacctggaaggtaagcaactcaaggattctccagttcgataaattctaacaagaaccagggtggtcgcgagattgcggaagtttcgagaccaaacaccaaggaacctcctatcatgatacgatctgacggcactgtcttctaataccctctattcccattttaattgcggctttgatacctgatatcttcgtccatcatttggttttgctatttgggacgagctttttgatgaaatgaactcttcatgaccgaataccttcatacctatacttcacgtttggcttttctacatttacttcaattcccttacttcctacttcctacttcctttattccacctttccttctctcctctctccttctctttccttctccttccctttttccttctttttcctaccttgagccttctctcttttccctctctatttgaggctattcatcagatttaccactggttttgggcggcttatttcatactccatctcaccttttttttttctctctacttgacaccctcatgttgataaaagccatttgaccatagaacaaagatctatgattttcggagacccatgagatgtcgtcatcccgtaacctcggcccaagctcaaatagaacaaacagtgccaacagtgacagtgccagtgccagtgcacgattgcgaggtctcatcagatcagtaacttgatgaaaactttagagtagatagattgctggcatcgtcttttcttcctatctcatcccacaatctatcccaacactttagaacatcctgagatcacgtgctcgggacagcattgttccatctccgcattagaagttggagctcacctgtcacctttccttatcttgctctctcgtcctcaatcccgttgtcaaggcagaaaaatgataatattggactcctaaccggaactcgataccattgcacctgactgaccctgtgaaggcactgagttgccctccagatcgacccgagttgcccccgcaagagcggggcattcagctcaacggcagcgccacgaacatctaacaccatggatgctcggaagaagaagagaaaggtgctcctgatgggcaagagtggatcggggaagtcgtccatgcgctcaattatcttcagcaactatgtcgcaaaggatgtgcggcgtctaggtgctacgattgatgtggagcacagccacgtcaagttcatgggcaacctcacattgaatctgtgggattgcggagggtgagtaatgcgtactccttgcaatccgggaggcatttcactaacaccgaggttttccagacaagatgcctttatggaaacctatctggcctcgcagcgcggcaacatcttctccgacgtcgcagtcctcatctacgtcttcgacatcgagtcccgagaagttgagcgcgatctcgacacctaccacgcgataatcgaagcgctgagcgagttcagcccaaacgcctacgtcttctgcctcgtgcacaagatggatctaatccaagccgagcaccgacagcgcatctatgacgagcgctccgccgtaatccgcagccgatctggcgatttccgcgtcgacaccttcgccagtagcatctgggaccaatcgctgtacaaagcctgggccggaattgtgcacaagctcatcccgaacctaatcgtcatcgagcgcttcctaactgccttcgcgaagaaaatcaacgccgaagaagtcatcctcttcgagcgctcgactttcctcaccgtgacctcggtgacctctgaggtcggcgagctgaatccgatttacgaccgccacgagcgtctctcgaatatcatgaaggcattcaagcactgcgccgcacggaacaccctcacaacaccggcttcggcgggcttcgtcgtcatgcatactaaaacacctcagtttaatatcttcctcggccgcttcacggataacacctatatcttccttgttgtacctcccggcgaggcttcgtacaactgcgctgtgctcaacacaatgcttgcccgcgagggattctcgaaagcagcggctggcagtggcggcggcgatggcttccctcttcctccaccagaaacggcagatgatcatgcgaatgggtatgggtatgggtatgggaatgggtatggacatgggtatggcaatcccacgtaaaatgggtagttgatttgccattgggtctggctttgtatagctacataactactaggggatgttgtctttcccttccccccttcccccttacctcccttttggttttttttgttccttgacttctgaggatttatgacaaaatacagcaggcgctgaatgatggcgttatggattaatgttttcttcttctttctttcttttcaactttctgagaattgagataccctgtgggatttttttgtacttttttttttctaaaaatatcatgaaaaattacccaggtattctgcaaactattgagaaagctcttgagttttatataaaatctatgtttttcttccccattggtgatggtgatgtatatatgcttgacgttgtagatcatgcaatcggccttgtttcaaatggaactgccatgttaaaaggaatacaggcagcctgataccaatgtttctatatcaattccctgctgtatactgcatagaagccaaatcgctacaataatgacaacaagaccttgatcattcatggcatttacttcatacaataccgcagtgacataacatttcatccgaaccatctatattcctagcatccgatgcagaagcgaaacgcataagagaagaataaaaacatgggagggatttgattatctatcggaccggccggcctcaacggagaaggatgaaaaaaaaggtgggaacaaaaagataactcggacaagaagggcatgaacggctgtacaaaatcaatcatccagagagcttgaacgtttttcattggatttctggcatgcgcatggcaatgtcgcccgactgtgtgatgtatcgcacccaggggagagaggggtattgcagctgtgggagttgattgttagtgatagattataagaatccactgatgggaaagacttacctttggttcggtgatcttcagatatcgcacttggatgccgctggtcgtgaaataggggatctcgaacttgacgttgatgggacgtttcgacttgcctacgccgccggctccgcccatgctgcctccgaacccaccggtcataccgccgccgcgctcgtcgtcacccttgacagagggtagacctagctctgcgcgcatgaggaattccttgccgccgccgaattgcttgatcttccagatgatggcggacttctcgggagcgtagtgcacggttccgatatttgtgcggaagcgcggggagtcggcgtcttcggggacggggacgagaatctccacgttgttggcggtactgcggcgtttgaattgggctttggcctgtcgtgaaatactggttagggattgatatttggtaaactgggtgggaatgttaccttgagcatatattcaattcgggatcccgagtgcgattcaaccacgcactccacccagatcaacggcttcacttgtgtgttcagtcggtagctcatgagctcgaattcaccgtccggagggatgaaactgattgtgcggtcattctcgaagcgcgaaagtcggacacactggtggaacttcacgtcctccatctcgaccgacttgcctcgtgtagcacgacccgtggtctcgaacatggctttgtcgttcaagcccaatcgcaactctggcataccactcaggtagcacttcatcttgacagcgcccagaatctcagagcgcaggacgtttccatttgctgaaacgagaagattgagagactcgaccacgtcgaggaagacttcgtttttgcggtagcgtatcccctcgctgcgccaggagacagcatttgtgacagcgataggtggccgtgcttggacatccagcttgtgtgactcttgggtgatgtatctggtcatagcgcaggtctgttagttatgctgtttcaccaccacccccgccgcaccagacccagctgcttactcttgtagaatcttgctctctgttgtctgcgggtatccaaaatccatcatctcatccagtaattcgtaaatgacgacgaagttatcccgaatactctcctcctccaataccttgaaatattcggtgaagacctccaccagcttgtggaggaagagtagaatttcggtggcatttgtgtttcgtttggtcaatgcgaggatatagaggttgctgtggcggatatagaggtactagacgaaaacacccctgtgtcagtacgtgggagcgcacaataggagacactcaggagtgggcgtggtcagggcaatgcccaggctcggtgggacgcacattgattccctcgtgagagaaacagggaggaactgctgagctttcttcttcggcatcactgaggaggatagggaatttctcgactgcggacatgggaatatctccgcggtaattgcgggccagtagggtctatagatggtcagtgggggcttgtccctggacgcattgacgattttcccggcagggggtcgcatcgccctgttctgcacagtttccaatagcctaccttgcccttgaggtcgaggaagaagagtgccgacgccatgacgtgtcaatgggggtaaatagatgacgggagaagtggtgatgatctggtctcttgagatgggggtgcgaaagcaaaaaaataacaaagccaccttatgcgcctactgcagcattgtcaataaagcagtaagaacaaatagaatagcagcagatgaggtgagaaatgaaaggagcagatcagcggaggattgttggcgatgcccgcatgtcccaggccggagatagacgccaagcccaaagcggactagcgtagaaaatcacacataaaagcccgtcgcgcacttttttatttcttctttcttcaacgctcccaatagacagttcaaggcagtataaagtcctttgtgattttctacagctactccggcattctgtcggagtgctatagtgttttgattactaccttgcgatacagtggtgcggagactacgatcttacgagggttccataagagctggccgagtactttctctgttactcgggcggcgtcagaggaaccgtacatttctataacttcaaatgaattttttataaatcgaatcttccttgtaaattgtcctaggtgcttattttgattgtaatctgctccattcaatctgcaagtgcaactctttcaagtggtatttggcagtagtctgagaaatcaaacgatataaaaaaaacaagtctgtttagaagtacatgtacaatcgtagaggttccccgattgagaagttcactccccagtcaacctaccaccgatggaaatatcaaacaagataacgccctgaaaatgctccaaaggagaccaataccccaagcccaagtcttggacccttacgagaccgacttgagtcctagtggttcaagtatccgctcacgagccaccttggtggcaacaactcctcccttctctagcgaaacagcgccaacgatagcgtacatggtatgcgcgagaacgagctcaataccggaggcacggaggtcgttaggctgggatcttcgttagctggtgatcaagaacaccaaagactaggatggagacataccattctgggactccatctgagaaccttctgtaactcgtacttgtttgcaagctcagcgagcttcgaccgctcggtgaggatcttcttggtctcaccagagaggttgttcaatccatccagagccgggtgggtgaaaggcacgcgaccatactcgtccttcttcggtgcggcacctgtgtacggagaatcctgtgccaaagccagcgatgcttgcagctgcacaatgcgttttcccaggaaggccagtcgatcgttgaatccgcgacgcccttggtcgaaactcttatgcgtcactgccaaccacttggtctcgtccgagaggagtttgtcgccgccattgccgaacaatcggatgtagaatcggtctagcaatagcggatctgcattgacgtggaaggtcgggcgcttggagtcaaggtgcagactgaagggggcctttgccgccgcgggagtgtaggaccaccggggcttttcttgttgactggactcctccgatgtagaggtcgcgaagttgcggcatgggatgactcccgcaattgggcgaacggcgaatttggatgcagtgcaggcggtcctggccgctcgagaagaaaggttcaaagacatggggtcggtggtctgcgtgtctactcggagttgatcgaacggaaagcaaagaattcggcctgggcggtgtgatactgccggtcatcaagtacccagacccatgagttctatgttcactgttgctcatgtctgtttttcatgactgcaattcttacaaaaacttgttgctgaacttaattctgttcaattgccatctcgccggtttgacatgcagttaaacaaccttggaagccggaggcaaccgggaccttcaccgctgctgcgcggtatcttctgctcgaatgcttgaccttgtgcaccggatccgaagcgactaacgctgattccggctgttgcagcctaccacaggccagcatggctatgacagttggaggtggaacacacacaaacttccgactctgccatgcctcgatgcatatatgatcaaaacggcatatgactcacattaattaagcaccttggaagcctatgtggaacattttagcggtcaggctatggagcttctgaatgatgcttcgatatactccataccgctagtcgcgggccaaatccagcacacataggctttcgtttagcttaggcacggcccgctatgatacacgatgtgtatttaccccagctgctgttgctagcagctttgactcatgttttctgcatgtgcccattgaaagttggggttcgactgggtgtagatggtctcgcggatatccccactactttgtccagcaacatccttctctggataatatcgctattatatgaaccaataggaaacctgtgctctctcaccttataggttataggtccaatagtgctgccaggtaacatcatctgactggctgacgggcgacgcaaccgaccatgagcgcggcccaaagatcagggacacaggtctccagccgctgcagagaaacggtgggaaatccaaaagaaaagaacagaaccatacggaaggagctaggcgatcaagaaacattcaaaagaaggttcggtaaccttctcggaacacagtcgttccgcgaaacctgccgggtatgcagaggccatagctacctggagcacggggcagtgtttttgggcctgcctggttgcggatgtacgcagctggaaagctcagctgaggcccagtggttggctcgaacggcccatgcctctctgggctgcggaataacggccctgctgtatgctgtatcatcgtagcctgagctcgtcccctggattaggcaagagactgtcatgtaccgaaggcaaaacatgatccacgtgtattggcgttcggtcttatttggccgtgctccataggtacgcttcctttttctcatattgcctcttatggtcggtggaagcttctacgacttgcatatccattattcgcacgactaagcaagttcgcaacccacaatgggcattgtgggagctccgataaaaggaccgggatatgttaatgacagtgcctttgcccatcttcgaaaggtcctaagtttgaaagacacaagaacacaagctcctcaatgtttgatggcctcgaattcatacttactttttactaaaacagcagacggctgttcaacccaaacattattactaaaagtattgaataagtagccaacggcaaatcatctagagcgaacccagtgaaacagaatccctcaacagactgcaggaatccgaagggtcagaccgctggtggaactctgccgtctgcaggcagttgatccgggggagaaggatttatactcgttcattgcggacattaagttgtatactatttgctttttgaggaaagataatagggcaaagtggatctacttccaacttcctgtcgatgcttgcttccggggaaatgaaaagaaacaaaaatataatactcacgatagcgggtgtgactgcctgcgggtactatctaatggtttatacatcaagtcttcacacgggcccttgcagactctaccaagatattgatcttcacggatagtcatccccaaggtccacggatagcaacgggaatatgaccatcgccaaacggctttttgtcttgatccttgatcgggatgttcgacagggtagcggtgtgcgactcatatcgatggcgacctatgaccccagctaaacttgagtcatttaaatagacatggaccagtccggatttcaggtcatcttcctttaaaacaccagagttctttgtcttcgtccttttcccgtgtttcgttgcagagctatacttcctttctctgtcaaccctgacttgtgtgctccatttcactacaaccacactcatttcgtgcatttcaaacatccaaatggctttcaaccctgcttttgcccatggcttccagcccacccctgcatcgccggcccagacatgctatacattcacgggaagcgacccggcttgtgatcactccgtgcaagatcctccttcaccccgacctttccctcccaaccctcctcctagtcctgcttagatggcagttgcttgggttttatttgcttggcgttgaggcgacacgggacaataggtgagtgttgtctaacgcagccatattctagatccgcaagatatacaacggccaagtcacggagatctgagtgaatactaacttacttacagatcataccccaacgcattttaactgcggtctgacggggatatgcattgatggcgactacgactgggataccataatacgatgtgtatcggtgctggtacaagaagaattgcgggtggaaaatggcaaagtcacgaggcacactggaccctaaggggactgcatgtgtgagagtgagagtgaagatggccctcgagtgacgggttagtgacgggttagtgacgggtttacatactcgatgtgtttttctcatccgcatatccattgtctggcaagatagcttaatggaactacatcaagtgggaccgattgcattttcacactgatacatgacatctagaagtaggcgagaagagcatctagactttcacaactcaaaattgacatactcgtatattcagatcgtgcaagtaatctagcccaacccgaacgcaatctccaattaaaacagctgaacagacgaaaaagaatcagcgtcttttgagcttgcgccaagtgacccgattcgtgtatattttagaaaatcaatttagtaacacatagggaaattcggaggtatgggatacggaaacatttaaatcaaagcaagaccaacagcactggcaacgctgagaccaatcacagtccagccagtcttgatgataacagggttagtgagaccacggccgagatcccacatcaagtggcggataccgttcatgcagtggtaggtgaaaggaagggccagggtagtcttcagggcgaccttggccgcgaaagggagggcacccatggcagcgaccatggaggcagactcgatgtgccatccgagagcgggagaggcaaggtaggcagtagcccaaaggtagagggtgccggagagagccacaccagtgatacggtggagggaactaccgatccagccgatctggggcctgtagatgctaagatgaggggcaacaggacggcgaagacgctgctggacgaggatctcgttggggtcctgggtgtttgaagtgacttgtctatagaccatattccctggttagtatggacttttggagattgcggatgacgtaggcattcggcatgtgcttgattcgaagacgagcgaagcaattaaagcttgtcgtttaagcgctgtataactgaccttgtctgaatgttcttgctgagggcaacggccacaggcgaagcgcccatcatggacgaccgcatagcgagcggttgctggacggcaactgtccgggataagttagatcgcagattcggacaaggtaggaattgggctagacatacgccgtcgcagcgattgttgggcaagcttctgggagaacattgtgattgcagagttgagattgttctgtttgatcaggatagaaatcccaaatggctcgcgatggctcggaatggacggacgacctcgggtacgggagtcttaagtcacgggacttgcatccggtcgacagcggctgccaatcagatccggtctattaccagccggaatatccttattcccgacgcgctaccgtggtcatgtgactgctcgcctgttttcccactttcttcctttcttccgtccgctgctctctcttctttctcttcctcaagagtctccgctcacgtcgtctactggtcttggctgggatgatgtcgtcgtgttaagctttccctcactgactgcggctttctgtcgtggacgccgagggatctagaggctctcagaaggagagtcccgtcgttaatcgcccgttccactctaccaatgaggggaaggggtttcatattcagggatacatactacatgtatcacatccattgatgtttgtagatcgccaggtttttcggacgcagttggtttgaaatgtcactgcaactgttgaaaagcctgcattcgctgtggagaagcatccagccgaggcatttatgtttgcacggttgctatattcactcgagttatgcagttatattcaattcataatggacaattgaaacaatgatcttacctcttacatgcgtctgttcgtaaattgtcgtcggttgtaaactttcgaggttggagatgaagctatacacggttggttccttgtcacatgtcaaaggtcaaccatggcatatattctctcccttcttaactaggtctgggcttgatattcgatctgcgggctaatactcacaagtagataaagggctctagacctcctagcgacatatgaatatccctttgttcagtaatcaaaattgcagatgcaacctcggcacctcggaccttccccacaagtaaagagatccgccgcgtgctgacatccgtttattatctgttcaaaaactcgagaatctgcttgactctgtattttccgaagcgatcaaggaagcgatcatactcatgttagtatatatggtccctattcgggttttatcttctttccttggaagttactgactccgcatcagattagataccccgacttaacaagatgcctttcaacacagccttgacgcgaaagctcggtattcgaggtgcgctatgaattcattattctgcaaatatcaccagctgctgatcacagatatagtgcccgtcgtgcagggtggtatgcaatgggttggatacgctgagctggcctcggctgttagcaacgctggcggacttggaattgtatgtttactcttcaatgaaagccctaatttaatacagtactaacaatacaatccagctcacagctctcacccaaccaacccccgaagacctccgcaaagaaatccgcagatgtcgcaccatgaccaaataccccttcggagtgaatctgaccctcctccccgccattgttccccccgattacagtgcctacgcccaagtaattatcgacgaaggagtcaagattgtcgagactgccggtaacaaccccggccccgtcatcacccagctgaagaaggccggcatcatcgtcctacacaagtgcacgaccatccgccatgccaagtccgccgtcaagctcggcgtggactttctttctatcgacggctttgagtgtgccggccacgtcggtgagcacgacatcaccaattttatccttttgagccgtgcgcgccaggaactcaagattccgttcatcgcctctggtggattcgccgatggccagggtcttgctgctgccctggcgctcggcgctgagggtatcaacatgggtactcgctttatgagcactgttgaagccccaatccaccagaaggtcaaggaggctatcgtcgcggcacaggagactgatactgcgcttgtgctgcgtcggtggaagaatacctcccgcctgttcgctaacaaggtggctaaggatgcattgaagattgagcaggagagtaagactggcgagttcagcgaggttgggccctatgttagtggcaagcggggtcgtcaagtcttcattaacggtgacgttgatttcggcgtaagttaattgcaaaattatgtttcatgtgcattcgctgactctttcgttatacaggtgtggactgccggtcaggttattggcttgattcacgacatcccaacttgcgaggtcctgctcacccggatcgagaaggaggccgtggaggcgatgactcggaccaggtctttgtttatcgatgctccctccagcaagctttgaggggttttatgttacagatgtggtctcaggcgtatttagctttttattgtttagaaagatctaacagaatcattttgggattttggtgatggcccggctttgtacatttgcgttttgaatagtacttccaggctatcttcacttcacgctcgtcgatccacgtcatttccggcgctgaaataagagctacccactctccacaggggcttggtcaacggtcgcattcccgagcgagggtccgtgatattgcatcaaggatctgcaagcacgcagatccgcggacactcgggcattcctccaacgccaacctccaacaataatgatccaacgcgatagcgaagcttttgtccaagcctactagatgaaattgaaaaagaaagaatgatattttcttcaaagcccgcgtgtttccatgtgagatcaaaaaaagagtggagacatccttgcatgcagtcgatcctcgggggaatgcttgaatcttctacgtttccggctctgaccattggttctgtctcagttgtagcatcgatttctcgactatgcatgatatcattcatcatgagtggtccccttaccaccaacttacaccgtgatgcttagtattctcactgtagatcgtgctgtttagagcagggttagaatatctcgaagtaaacgtagctgtacttgaggttagtatacgcaatccaacagcccgagcaagttgatcaaatcccattgcgtttcacagcagccggtacaaaccagcattaccccgtgaggatctagatagtgacatacctcgtccaacgtgtctccagcccagaattgaacgcggccgaacttagcctcctcccggaattagttattcaattcatatatcccaaacccagcattctgacagctattccaatctctatcactatcaaaaccaataccaacttcacatctccaaccacatacctataccacagcacactcatcctcacacaaacaaatctctccaaaatgggcttcaaatccaccctggcacgctgcatgcgaaaggaccgtctctccaaaagactctcggcaacaagcaccaaggtccacgacgaagactcaaacgatctaatcaaaacaacctccgaaacagtctcgacccgcgcaagcatggagtccaccttaaccatggtgcaccactcgttccacgaaccagtcctgccaggcgagtcgccggcgaaccgcatgcagatcaggacagatagtgggaatatgcggacgttatttgatgaagacactacttccaaccaaccgacagaccgcgctaccaaggcgctgtctagacccgcatatccgattttgaaattggattgtcggtcgcctgtcgatgcaccgaggagggtgttgcaggagccttgggagatgtcaacagatgggaataggagcaaaaccccggtgattgctggttatcccggaaagggtgcttcgggcttttcgtctaagacaacggcccaggagggtctttcgcccactgagaaagttgtggccgagaagaaggataagaggtctatggcggctttgctgaaaagacattgtggattgaacatcccgcgctcgtcgatttcaattaaggcttcgcgcgatcttcagtcgccgaagtggttggattctgctggggttacggaggaggaggctttggtggataagcaggatgggaagtgggtggaggtggatttgcatgatgagaggaggaggaatagtgtctggggtggtgttgcgcttgggagactttggtaaaaagtagtggatcggaatgagtgttagttcttttgtacatagttggcacggtatttaattgaagtcaaaattgaacggttgtctctctgaacgaatggacatgatgatttgtaattaatttccatgttgataaatggattgaagacgaggcaacatgaaaaggaggtcatgaacaggaagtgaaaaaggatctagctatgccccagctggtttcgtcgagggggccgatgtaatggagtgcgaaggagcttaggatactggacgccgaaagcagacgagggagtctagtgaattaggagagaattgaccgatctgagaaaatggatgatgatgcaacgagtctaatgaattaaagtaatatatatggaaaagccctaaccgagacagaaactgggccgttccaatgcgcagggaacaagtaataagcagaaatcaaaacaatcttctttctccgagggtgccacacgacacaagttaaatgatacacgagatggttcaaaaggaatctaactaatcaattgaaagccaaaagcctacttcccatgcccgaaatcgataacagtccaaaccggcagtggtaccatactctgcaccaaggtccaaagagctggcgagattgccaatgctttttgcgtgatgagagaaaacacggcgagacgcttagaggatggagccaagggcaacacaggggaggccgagaccgatgaggtcggagttctgtaagatatgtcagttgtagtcgaaatagcgtggatgttggagcactaacggcgctggaaggagagttctggcagcaggcaatgttctgcttgcacttctggttgatgagatcctggatggggacaccaatgaggacggggatctggagatccagcttggagcactggtcgaagagaccgaggccagaagcaccggatccggagccgatcaggttgctgagggtaccaccgaggattccggagttgatgtcggtggtgtcaccggcgtagacagccttgttgcagcaagagagctgggcctggtcaccacacttggcctgagcctgcttgacagtcatgttgtcggggacagcgaagcgaacgtcggtgttgcccttgttgccgacaccgttgccggagccagcaccaccagcggaggcgcctccagggggaagagcgtagacagtggcagcgaggccgaggacaatggcggagagagagaactgcattgtgacggtggatttggatttgaacgagagaagactcggagagtgtagaagattgaagaatagaaggaaagagtgaaagagagtgtttgatgtggatgaagaaaaaacaaaacgagggcgatgaatcacctcatctttatagatttgaccggcggtctgtgagtcgccctgactccatactctagggccaaattgttttgtttcctgccaagatgatatccagtatgtccccggaatgttactggttaggaaggggagagggagatcgctccactccgcagggcttgcaggccaacgagggagctcctgtggaggctcctggtatggatctactgccaggttctcacttcacgcgactagggacatacctggcattcccttgccctcgctcacctgcctggccgaggggagtgtccacaaattgcctgtaatgtttggatgaaaacaggtgtaatccagatacagctatgctgtaccttctctaactacaaacatccatagcccgtaaacctaatcaaagtaagcttaagctcttcaagtgggtctaagggcgtccctggagacttcgatttcccagtacaggggcttttctccctttcattggacttgcactttagaagctaaggcatgtaacgtatacactaattactcatcgaaggcacctgactctactgagaaggctgggattcttcctctaagtggtcgaatctccgtaggaggatcatctgcaagggtgactgcaccccgggcactaaacctacgtagggagagaaccaagacactcccttcattgtttaatttcctttaaactacgaggaattgagcactgtaatggtaatcacgagccattcccgtgaagtctccgattgggatctcgctttcccccgagaataatggtgccgattgcgaccaagcttccccctggcggcttctcacagacatgaatcggtcttgtttgcatggtttgacctcacacatcttgtacccttcactagattcttagtcaagtaatctcttcccttagtctatctgtagtctgcattgctagtgtaccttacttctcaatttagtcccctgtcgcattttctaatcaagtcttcgatgacctcgagaatggccgggatcttgctagattcattcaaaatgcgtatcgcaatcttattgagagtaagtccgtcgatgaattgtatagtcacacttgaatgaggacgatatggagaatgtagtggaaaatgatgcctggcgtcctttgcgctgcccacagtattagatagtacgtcattctagtagagtatctggtagtcaatggcctaatggtcgctacttggggtaattccccaactagtaaagtgcaacgctgattgatagtcaaccggctgttctagtagtcttcacgtaatgaatataccacaatctcataataggttagataattctctctatgtctctaataatagtttggttgtgatcttcttattatacttcctgctgaagtagttggggtaggaaatatttgtttgaatgtagaggttctaaatatatatttcgtcggaggacaacgattccaagatacagcacacaatatgtatattgtagacctaactacataacaataaaaatagtgttttcagatatgcaattgctcaatggatttaactatatcatttaccaaatttcctaatagtaccttcatggtcgttcatggtgccaaccaaatggtcgaaatgtctctctcctaacgcctgccgcacctcccacgcgtgttcaattaaatctgaaaaaatacagagatttgacgaccatctctagcaaaaattcaaggtcgcgatcgatccgattgagtattttttttcagcgttgaccaggcattttcaatggggtataccctactatggctattaggaccagttcccattctacatcaactgatcggccgtgaataagcgaattatcttgcataaatgttccttcaagatattagtaaacgcgaggaattgcagcctctaaatctccaaaacatcgcaatacacggcttcaaatgagggtgtgagatccgctatctagggatgtacggagtaccagggtgcccgccgcttgctatggtcttataaaacatctatctatctaacgaaattccgtatttatatcaattcaaaatggaaataaatcaagggaacagatctgaaggcgcatctcctgaaaagacctccaaccccgaaacaaaatcattccatagcatcttcgaagtcatgggcgcattactatatggctggacaccagaagccctcaagagatcattcatccgaggaagtaagacatcgactgcctgcgcttccatttcgcgttgaatttctctgctgagtccaccttgttcaacgtaccacgctgagtcttccttcaaaaccacgctctcgtaaaggttaagcaagctcgggtcaacattggcatctatagcagcttcataggccatcctgtgaccaatcgcctcaactaatggaagagcgagcgggaggatatttcgattgaaccgctcgcttcggtgaatccccttggcaccttgttgaaggagatccctcgcttcggagaacagggaggcctcatgccgagcaatggggctggtggaatcgttcggtggcggcatttgatatcgaccgagcaatagttccgacgcgagtcctgtgtttcacggttagtcttcctcgagaaatttcaagttccagacacgtacggatagcaaggacgcggatatcaccctctgcagtcgatgcgccgcgcatctccagctaggaaggagaatcagtcagctgtcaaaggagtaagtaatactaagatcttacctccatctgaaggagttgattatgctcataatgcccgtgccacccacaccgttcattcatagcggtgatgcttttgctgaaatgacccagtgctatcgccttgaaagctgtggctataccatggcgcactcgggggtcaacgctctgttctcggaacgctatcgctgcagaaactaggaatgcttctagcacactatactgggcgatagcatggaggatgggcatatgttgagtccggaaatcaatcactgccatcggggttccatcctggccactaacaagcctgttctggctgaaacaggcagcattgtaggcagcgagcttgagtgacggtatgacacacccggagaggaagagagtccccactgcaacgcggtgaatcgaggataagaactcttcgcgcttgtcttctgttccttcaacactaccaagtaaggcggattttggtaggcgaacgtggtcaaagtatgtgagagcatgatcgactggatgcgcaccagttcgtggaggcaaggccctttttaaagattagctcttatagttgaggtattggaaggcgcttgcggctcacttcgacataatacccttgcacatctcttttccgtttccaagctggactaggaatggccggattccacagtctttatctccactcacaagacgagccatcacaattgcaaccactggaataccgccccttggggtggttggcggcatgaccctgagactatctgttagacaatttcagaactgaatgcttatattctgcagcttactttgcatcgtttggggaaggagtatgaaggtcgatgtcaccatcaggcagaattgttgcggttgtctgtatattccgtgcatctaatccatgattcacttcggtcaacataaattgtgccctggatttcagccccgttaggtataaatatttgaagatttgcttatggatagacccacgagagatcgaaatccaaagcggattggaggatccgctggagctctggacgtttcaatgcaaaaggagccagcgtgcccacaaataggttgcactggatactaaggagggtgaaagctccaccgtcgagtgttagtagaggctctcggtgtagcttccagaatttaggagtgatgtataaaacatctttaagcgtcaggcctattacagttagtggttgcatatagtggcggaagataaatagggaataccatatgcattagcaaaagccttcgccctctggtaactcagtctggtagatttctctagactgagagagcgtggggctggcttgaagagttccgaacgtgctagatcctccatggctagatctacctgctgtagctgcagcagaaactgctgtaatccgttctccatagtgggcagttattctgtatgaagggtttgaatatattcactatcgaaaagggaacacttaggggtatataaaccacccgagagaaactactttatgcatttcagcagggttagccagcaatatcccgctttttttcgatagacctgatcggtgctgaaatttagaacacaagacatacgtattggcatagtggatcgacaaaaaagataatgccagtttctggttatagggtttagcgactcatcattcgatgctgccttcggcttttccttcctgtttatggaagccggaacagatcggtgtattcggatcaatatcacgatattatactgaatattaggaacatgtggattctgtcaaattcatggctagctgggtctccattttttattgactagggtggatccaaggtatagtttgtctcgcgtgaggatcgaatataagtggatttgctgaccgctagaacaaaaataggggtctagcctgttgatcgattaagttggtgagatcgatctaaatatcttaaaagtttcggatcttgaagcttgcattgatctatgttcgatagaacctcgaatccggagaagatcgagtgaatactaggtccaaatgcgttatcggctactccggagatttgtatgcaattatttcttttccatcgcatgtgtattgaggagccttatcattgtggaagaccgtgttctcgtatagagtacttttactttgtatgcgggctatgcatgcaagatccccactgctggagggaatatactcctcactatcttcctacactgagtactccttacatagcgccacgagacgaatcttcactgtatcttcctgtatgatcaatgcaagtgtagttcagcacagccagagagtcgatacatccacgatgactatattcaagcttatgctgcatactaaacaactcaaaccaataaatcaacccaaggtgcattagccatatcagcaagagtttactagacaaaattattagataccgaaaagatacagtggcaacttatattctatatcacaatgaaagaggttgcataagctcttgattagcccagctcataatcgaaagtacctgagactcttgctcaagcgcgccatccccgaggagaccgaccttattggatattttggacagatactgtagacgacaatcagcatagtgatgatgtagacagatgacacaatgcagcacttcgatgccgggaatcttgccctggcttagtggaaagtttggccatctacatgatcttaccgatattttggcgtagaattacctcgacgagctcgtatggtactcctttgagttcggcctcgaacacattagttagtttcctaatatcgggctgtgatcagattgacggcaagatgtgctaagcatataggggtagttagttatacaaagatcaaggcgttgatattatatattagtgattgactttcaattacgtccaaatcatatttttcaagaataaacgagtcgtatatattattcccagaaaaaaacaagtttgatcagatcgagccctagtccgcattgctttgcattcaatacatgcaatggaacaaatgacgatcagacaaaatgaattaaaaatctgtttctcagaaattgaacaagaagattattagatgaaaagcgccaaaagggaaataccaaaagcccagagactacacaagggtagtttcgatccaacatttccgtaagcgacagtttcagttggctcggatcctgaaggcttggagacagtgatcccaggggcagttggcggaagagaagaggtgggcttgcagctagttgtcatcttcgaagaggacgcgtgcgcatagtgatgggtcttggaaggagtactggtcgtagtaacaaccaccagattcacagatgttgttgaggaacaagtgaccgtgctgaactcaacgagcggcacagttgctgtgtgcgaggcccagctgatggtggtacagggagcctgagggacagtcgtggctacagtctcaacaaaggtacgtgtgttgccagtgatgtgagggccagcagtggtcttgggaacgaggggagaagtgcaggttgtagcaatgtctacaatagcagggttctccgggacgaagggggcgcaaataccagcgaagtaagcaagggcggaatcttcctccgtctgggaggtgctccaggcccgaatgcacccgctaactttgtccgtaaactcggtggatgggcagaagcatcccacatcgctgttggagtcacacttaggaatagagagccatgtgttgagacacttggggaccacgttggggcaaggggcagtaacaacgggcgggctgggcgcgattggggttggggtactaatgggagtagtgtgcgaatgaacgaaatgagatgttgtgcagcttgtgctaggggtttgcacgggcgtagacgaggtgcaacttgtgctagtggacgtttgcacgggcgtagatgaggcacaacttgtgctagaagacgtttgcacgggcgtagacgagcagggcgtgcttgacagtggatgtgtagaggtagtaagaacgcttgaactagggcattcagttgcagctgatgcccatttagtgacgatgatctcctcagtagtccagactgtggaagtcgtcatatggtgccaagaatgactagtcgtaggaacatccggcacagacgaggtccaatggaaaggaggcaaggaagcagtcgacttcggggggtccgaaggaaccgtctgcacgggcgtagatgggcagactgtggttgacagtggatatgtagatgtaatcaaaacagttgaatgagcaggacagttagtcacggttggtgggcattgggtgatggtgatctcctcggtagtccagaccgtggaagtcgtccaatgctggaaagagctgctagtcgtaggaacctgcggcacggatgaggttgaatggaaaggaggcaaagaaacagtcgagctcggactaggctcagagtgatagtgagagtgagagtgagggggttcaatgacaggaactggtggcttggacccagtagagcagtcaaagtcgattgaatggatctcgagatcacaatcaccaaacttgctctcttcaggaagcgtgaactcgactgaaacagcaccgccacactggtcattgccaacatcggttcccttgtacgagctcgaagtgacatggtgacaggaagaaccatcgggcatctcatagatgatgaagatatcagtgttccgggaagttgaaagatggaagtttcggattgagaatggagcgtcggcggcggaaatcttgattgtccagtcatcatcacgagaaagctttcccccaaggcaagtacccttaaagtagttagaatcaatagcattttacatatccaagagcgacctaccccgtaactagatccatgacagccattcttgggctcgaggccaacgaagtggaagccttcaaagctccaattgtcaccgtttgccaactcagacaagtcgaagcctttctgctgaacatcggagcactgattgtcggtgttctctggactggtgtagcagacatcggtaccccaccactaagatatccaaagtcagatttgtattcggagttgtagaatggaaatactcacaaggccagccggatgagctagtgcagcgctaaaaagcgaaagaagagcaattcccttcataatgggcaaagctatattagttcaagctagtaattaaaataatataataaaatgagtgaatgacgcgagttgggcgtgggtgtaaaaagaacgtggcgaggtttgtcgactggatgttggatggagagcttccaagagtgccaggacatggtcctttttaacctcaaataagatattcggacgaactactcctactcgggctctactgtcaacaaaatcagaaagtagaaaggaatgtcagccacaacagcataggaattccccatcgatccaatggtgagaactcatactcgtgaagcagctggattcactgaaatcagggatctcacatcgctgtagttcagggaatcaatgcagggggaacattccagtgctagaagccccgaaagccaatcagagcagtcggtaactattcccgagctatagggctcgctcaaaatctcccgcaagcccaaagggttgggaattatgcaaggagctacacctctcgatttatttagcagtttggaaagacatgttcaggttataccaatttgtatcctacagtctctaaacactttcctagttatgaatgactctattagtaccgttgtaggtttgtgacgtgtattcggtttcaactgaaaatgttcaattttccttcatactccctagatatatcaaagcctgtatctatagttcgattgtggtatctgcaatccacgaggcgttgaaatacgtggaagagatctaaaacagggcaaactaaatatacattcctgctcgcgcattccaccagaaagttgcctagcaagtaatcgtttcattttctcttgataattgtgttatatcaaataaagcttgggcaaagcccacacataaatctgttgttgactattcgtatgtccgcgggaagctccaaagggaacttatatcgagtggagaagatagcgcaccacgggtagcaggatatttccatgttcgaagagcatgctcctgagatcgtgctgctgagatgattgtctgagtgccagtcctgcagtccgcattgtatctcgaagccaatcagtagcaaatccgaaatctagaaatcagtccgttgaagaacacggaaagctgaactgcgaagtatttcagcattgtaatgatctaagcttcatctgaaagaaaagcgatccattcaatcaagttaaatacagcgccgtcgtggaggatgtaggtgcagtcctcgactcgacttagacgctaatccaattcgggattagcgtataaatcgaatcatttaggcaggcggtgactcttaaatgaacgcacggaccctctatttcgactgggtagatcgcatccaccgatctctttctcttttgtcaattgtttatctgactgcaagtatcgttccttttattgctcagcatgtctgactcgccagaagtttccaaacctgttccacaggagcgcgccagtagctcgcccatccctgcttcgtcgggccttgagacggaagccaagcatgacatcgacagccagaaagaccaggcggaaaagaatgacccccaacccaccgaagaactggagatccccgcatccaagtcgcaacccgatgaaccagagcaagatgaagtgacatctgcaccaccactccccgacgaagtcccacctccacttcccgccgaggctccgcctgcgaaggccgaggacgatggatgggaacctgcatgggacgccactgcaggggcatattacttttacaaccgcttcactagagtctcccagtgggaaaaccctcgcgtgccacaggtcccaggagtcccggaaatttcagcagcacccggcacagaagacgcagcccccaaaaaagagccaatacttggtggctacaatcccgccatccacggcaattacgaccccaccgcatcgtacgcgcagtaccacgaagagccagcacagcccacgaacgcagccggattcgaaccctccgcagcatatgcagctaccggcacatttaaccgcttcactggacgatggcaagctgcaacaatcaatccggagaatcataatgatgagaacaagtctcgcagacagatgaacgctttcttcgacgttgatgccgcggcaaatagccatgacggccggagtttgcgcgccgagcgcagtgcaaggaagctaacaaagcaagagttgaagcagttcaaggagaagcgtcgtgaaaagaaggaggagaagaggcgggcttggctcagggattaatggtgtgtagctatgtttaagttctgggaggaagggagggttattcgatgtattctctcgttgccaccggtcgcattgcaatttcggagctttttgataccatctcaccggatgtgagagccggcgtttgagcttgtttgattctttttttctcggcgttttgcatgtggatagaggcagacagacttcctgtcgtctatccacgattgagcaaagttatttgtacagcgtaccatgtatcaacacaaacaatgtctcataatgaggctctcctagtaatttagattcgtattatacgacacgttgcgactagcgtccacgttaattcaacgacttctattgtaccgttcactgatagcccactatcagtcacatgacccgcgatatcaaattattttttgcggcgatcgcttcatttgttgccggatactctacgctagaaagcaaagaactgaaagcaaaggtaagattgaatgtattccctgttgattgactggaaaaataccctcaacaccgactttcattttgtggctggaacttagccttcacattgaaacgcttatcaacgacctgattgcatggatatatcgcgggggaggatgcgtactatgcaaaatccccaattccaagagtcctttatgattctagatatcctaccctcgctttccttgctcattgtcctgtcatcttccgtgaatatcgacttattactgacgccttactccagctatatcaaataaagtgggatatcaagaacaaccccaccaaaaagaaagagaaaaaaaaaaacataataccaaaatcctggttcatcacacatcatgtccgcctccacgacatcacaagcaaagccttcagtgccaatcgcactctccgccgaggcagtcgacgacctgatctatgacgcccgagccggcgacctcgaggccctaaatgaggacatcgccaatctagtcagccaacacagctgcaacgagtcacagatcgtggcatccgccatcgacatggcagatgagagtgagggtggctctggatcctgcattctgcacttccccgctgcgaatggaaactccggtatgtcatttcaacgacttgacctgacttgcttgtttactaacaccgctcagaaatcctcaaaactctgctccaaaagctgtcatctgcagacgcagcgcagcgtgtcgcgttcgttaaccaccgcaacaactctggcaacacgcctcttcactgggctgcgctcaacgcgcacctggaatgtgtcaaggcacttgtagaagccggcgccgaccttgaggtcaagaacgatgctggtcacgatgctgtgttcctcgctgagcggacggcgtgggctactgttgaaggtgatgaggaagccgagggtgctgagggcgatgatgctcaggttcaggagattgagatgactattggtgagaatgaggatgaggagaagcctgctgagggcgctggtgaggtatctgccggcagacaggttgttgagtggctcctggcttcggatggtggcgctaatttggagaagggggctactcagggtgaggctagtggatctgcttgatttatgttcgaggaggtcggaatgacattggttctttttgggcgggattggaaatgattgaagaaaagtttaagatttcacgcatgcaatcggtgatatgggtactttctattcttgcatatgttgtttgttcgtgtctatattaatgcattttgattatttctatcataatagtacaccgaaagatgctgcagggcttttagaatgctgccctagtatacagaatgttcatatcctctcatttacatatcagttcaatcactgcgaacttttcccgtcaccgagccggtgcaagacgagacccccataggtagcggagtagcgggatcgatctcccgaacttttgcatcgaagccgaccttgaagcgccggtctcgccagacgactgtcacaccgccatacaccgccatgatccagataggcagggccagcaattcgcggccgagccaggcggcgagccattgcatgaacggacgacgagtaatatgggatgatcgggagcgttgaggccgagcgaaatctggggtatcctcatccaactcgatgcattttgcggaatgcagcatgatatatagtgtccaatcgaccaggatccagaagactatgccaagtgcgaacaaaacaaaaaacgcacgccacgtcccgagacgggcagcaaattgcacgccattccgctcgagatacggcgccaaggcagtggtgatgccccaggcaccatagagtgtgcataggaatgactcagtgcctggttcgacaagcgtagcgagaagaacggtaaatttacggactcgcagccaccggacacgccgggcgatgtatgccggcacgctcatgttggcaacaggctgaatagccatgtcaccaaagaccatggcatgcttgccccaacgctcgcggagctctttctcttcccgcacctgcttcttccacagtagatcaccaatcagatggtcctcacagatattgtcggagaagaaatcgatgccaggatggcgagcttgggaacccgacaccgaatgactggtgagatagtcaaggtgggagcggcggaacatgttagatttccccacgatgcacggcgcaacaagtaccgtattgatcgcggtgtacattttggcgtgcgcggaggacaggaacagctcttctaaacgaccgcctccagtcgcgatcatggctgaaggcccatcctctggacggacggacggcatcgctgcggccgctgtatcagcatccgtggcttctgggttggcatctaggagcgcctgccgctcctcacgcaggttgctatctcctgtaacatccactgccacaggtagatggtgcacaaacttgtatttcttgctcgatgagggtccagtcccgcacagcctgtctaccatccgggcacagactcccttcccgacccagacattgcagtcaattatccagacgatatctcctttcgcttctctgtatgcgcggctcatatttcggatcttgggattcggtccgagcgtgtacgtattgatgccatcctgctgcaagaggggatcctcgtcttcgacgaaaatttgcgcgtccacatgcgggaagtcgttaattagtttgcggagggtaggataggctgggtctgcacgcgtcgccacgcagagacgaatgctgagcttgtcgcgcgggtaggactgtcggaaggtggcagcaaggcagtcatagaggtgcggctcaaggcctttgacgggccggatggcggtgacgtgcggtacatcggaggcggaggcgtttgttagccgtgaccgataaggctggctgaggaaatatttccatctgagcagaaagggattgcgttaggacatggtagctcaaaaatagcaggccaaatcgtacatctgaaaatatcctaggctgcacaccgccagtatgaatgcataccaaatcagggcaatccagccgattgcgacggacgcgtacagcgcgccatcgtcagacctgcgagcgaggaacgaaaagatgtgctttagcatgggacacgaagggaaagcgacatggaagcagacgaaaaggacattttggaggagaaaagaagcaattggatcgggtggattctcatttcggcagttagctgtctccgccctcacagtcaggtacacggccaaccagaggacatctcgttccactagtatacggagtcaatatcaaaatagcttgtctgttcggaacccccggatgtaagaaaacgtacttctacagttgaattggggcaattcggcaattggttgctattagattattttcgaatgtcattatgaagacaaaaagatccatttccccccaaactccaaggcctattccatgataccagacgcaatgcaaattcccctttaatcaagtttttttcttcttccggaccaagctcgcattcagcacgttgacactagtcggctctgatggagtaggttgcgtgtctcccgatccactcggtgtttgggcattcacagcgggcatgttgtcctcgcccaatgacttctttcgcttgcggatcaatccgagatcaaggacattgttggcggtggtattggcaggctgagtagtgctgctcgtggtgttggtgccgacaaccttcttgccccacgtaagctcatccgcgagagaggaaacttggtcgacgtagagtttggtactggcgatgacttctttctcatcatagaaatggtcgagaaccgaatccatcatcgttttgtagtccggttcgctgagaacgacttgtccgcgtccggcctccggccagtcgaaagggttgacagtgttagatccatcatcccggggaagttttggggaggtatctgtggtcgtcaacgtggcaatttcttcggactggctcgagccattctccactttcagctcgcccgaaatggtggagttgtcagaggaaccgcgtgtctgactttccattgacgtcgagttcatcagaccaggaggattgatcactagccacaggaagccaactaaccgaccagcagaacattcctggcggaaggacatcatctcccagaattggtccaaggaccgtacactgcgccagcgtccagcattgggggcgacaggctcaccttccttcgattcaggaagttcactgtccaggtcgacgaggaaacgagtcttgggatcgtcggggaaacgaggcactaagcagcggggaggagccgaagggtcgtggtacaattgcttcagtgggtagctgttgagccaccgtgggcgatcctgtgcatcggtcttggccgtaggcggaaagaaattgcgcgtttcaaagcggtcgcagcttggaacgatcaagtatgcggtggcagaggccttggcagcttcgactgtttgatccagcgctttcgtctcttgaagagcagactctggctcgtgctcgcgtaaaatcggatcgagaacacaacaccaccacttgattaagcctcgatcgtccagaacatgcttttcggcgttctcaatactgcccgggaataggtactgattctgggcgcgggcgaacagcgacacgaccaggcgtacaccgggccgctggcgggttcgcgccagaaatgagagaaatgtatttgagaccaatctcagaacagagaccttgcgcggtaattttaggagatgcaggagaccagtcgagtcggctttggagatgaagatggtggtcaagtgggccgtgttgtagaccatcacctccattccgaagataattgtttcaccgtcatcattggcgtcaattgacacggagaggaaatgattttcgcagaatgtcggctcggagacctggcccggcgcagctgcaaagagagcctcgcagggagtaggagttgaggagacatggcgaacggtgatctcaacccccgtggggagtgccttggccaagagatctgccagatctaccgccattattgttcgtccaattagagtcgtggaaaaggtgaagagaggagctgaagacggagctcgatttcacacccttgaagatcacgtgccaggaacatatttgtaccgccagtccaagggggtcgatatacagacatttggacatctttgatgcggtagtccaattgcgtaggtggtgatgaggcagtgaagactttagcaatgggattgaggctaggtagatgaccttaatgaaagaatgtggcgaaaggcttattgcatagactataacgcttggtgccgagcatgctatactacgatgaatgaatatgcgatatttgacgcgttaacgcttgtgctctcaccagctcttgcacattcactcgctcttgccctttcaccaaccttttccacgcttattctctcaaccacaactcaaatctcactcaatccaaactctgctactcgtggacacaagcagaatcaaacataccattgaaggtaagcaagactaatcagattaatctttcattgagcggaccaattgtactaatatgtcatcgaacatgagaagcccggcttcaagtgtaacagagccgcaacccggtcacaccgagagtacttatcaagatgtcttacaacccccccggggacttcataggtaagtctatacttgtgtcacctcactataatcagaatagccactaatcatgcatcctagtgcccgacatcaacacacaggaagtctgcactcagttgcagatccgttacgcctgcggtcactcgacaggcggcgagttcgttaaatgcccacggcacgtcaaaaaagaggacgaacgctgcaccagccgtcaaatcaaccatgtagatgtcaagaattcgtcgcacaagtgtcgcctatgcctgcgaagtgaatgagatatggtatggtatccaatcggcgggagttgatggtgagctttatcttgagatcgtcggaagggcgaagacgagggttatggcatatgaatatcacattgacaaaggagccgatactgtctatcttttaatcaaggagaatccggaaagaatccgactagggttattaacataaatccctgtaaaaagccacacacggggcattgatgtaatggtacataagtgatagtaggaccttggtaccatagttgggccggatgccacttaaaagtaagaagccacagcatctagatcatcggcattgagtagaatgactccttctctcaaaagagtcctccagacaaggtttcgtgcacgaatcgggaagtgtggcgtgttccaatatctagccccaataccgcgctcatttgcggtggaaatttggtcccggagagctttgagttggtcgtctgagagaattggatctgtatcgacagttatcttgccgacggcttcccggaaattcgtcgaagcaacaggcgagataacgccagttatatcggcatatttgggatcattgagatctgccagcggcgcatcgaagaagtagtctcggtctttgatgggcgctaccatatcgaacggtgtctctccggtgccaatgatggtgacgggtccattggtaacggttttgccatccttgacggtagttaagtagcccttctctcttagaggctctaaagcggcaattaccgcctggaacgtctcggggccggatgttttcacatcaatgaagaagtaaagcgtttggtcgggaacggtatcccacacaccgctgtttcaagaaagcattagcagtgagaccatatcgggtcctggccagatactcactttttagttggcgatgatataaatggactctcggggttctggcgctctagcacgtctaaaattgggttgatatacaaggattcaagagttcgagactccgtcagggcggattcatcgtggccaaccttgtctaattagcatgctacccagaagagcgcgcaaggcatcatcggttaattaagctcacatagagggtgccattgtataaccagacatcggcttcggtagatgtgcagccatgtgagagacctgggcatggtaatgttagggataatcagttagatagtagagctctgcataccggtatagaaaggctcgtctcgccaatagtcactttgggataatcagcggatgaacaagtttggagtgaccatgagaagtgtccttacttatgagaatgaacaggaatctagagattcgttgcatccagggttaacaatattccagatggcggaaaccccacagagtttatcgatacatggtgccacagatagactcacgggtaatagatctcttgttagatcagtgggatacctatagtctgggctgccatgggtgttttttaagatgctctgtaggctagaggtgatcgccccgagagctggatccggacccgcgaggagagccacagcaacgctagagaggaataacatgaaggcagagggcatttaatgacaagatcacccgaataattgacccgcctttatatatcgagctggagttgaaagaaggtggaattcaattgactgaattggagaggcaaattgcgatgacgatcggaacccggactcacgtgtttccacaaggggtatccataacatcgaggtcgaacattttccaagttagtatagaatgaatcgagttgatcatttgaaactgattatatctatcatgtggtcgctctctcgactcttagaaaaagaacagccaaagggcaatcaaagtgcgacaccaattaagagctgatcgcactggtcatttacttgagagactacaagaaaccgagaatagtaatgtatggtatttggcatgaatggcagacatggatttaagaaggtgctaaaaacatgaaaatcgcaagaccagcaccgtcgtcatggaacttgaaggcggaagacagcgagattgtagaagaaaaggtctgattatgaaagagacccatacgtcacggaaatattgccttaaacctcccgcacacttggcgaagaggcagctccagagtcttgtgagttccgaccccgaaggctgaggtttccgatacgttggaccaggttgctgcccacagcatcaactgcacccttgggcgcaagcaaagtcgggccttgagcggcagcttcttggactctgaagagtttaatggctgtgccgttccaaacaccaactgttcctggagttgcaccagaagcggaacccactaccatctcgctggagaagatgaagccccacagcaacgattcgtaccagcccatggaaagtgcggaccactcgaatgattgcacgcgaaccggcgttggttcggagattatacttgtaaccccaggctcttcagcaaatgatggaagattgtggattagtgtacgggcctccggactagcagcgctggcaagcgctgcatcgggtatatgaggtgcaatggctgagattatggtaaggattgtatgcaatggaagctctggcaaccaagactcgagctggcaaatattgttagtagcgaaacatttattggaaaaacggttcggtctgcatagacttacccatgggacggttggtgtgaagccactaggagagggtgtgaacaaagcagacatgcttgtttgactggtcatgctgttctgccgggagaatggaggatgtccagctggtttctttcctcgtgccttttcggacattcctcgcacctgctgcactccgttctcatcaatggtggatgccatggagggtctccgtgaggtatgagttgagaatgatgattgagacggagtctgtgccccatcttcacgttcatcatcggagtcatcatcgccaattgcaaatgggctgttttcttcggggatcctagtcaacggcgacctggcacccgaaggagtatgtagatcatcctctgactgcgaaaatgtagggctaatagcgacatctgaagaactgctagctttcttcttctcattctgccgctcgatctcttgttggccactctcgagagtgaaagcccgcacggcctcaaagcgttgcttgtacttcagtatcgagtagacaagatatgagttgtctagataaagtcagaagctatgaccgaaagagaagatctgggtagggtaattaccgatgaacttgtgctcgaggatgatgttaatgaagtcaagcaacgatgcaagaagagtatgattggattcgttcgccaacaagaagctgggcgcggacatagaagagaaaagctgaatgacctttgagcaggcgctgggagaaatatgttcgatatagggagcgatgttgttgaggatgatcagaagtggaggatacacagtgtctaggttccccttgctggttgtcatcaacgtgtgaattgactgtgctggttagtatggtattatttagatggaacaaaagacaaaccataatcagatagtcggcataagatccccggaacttgagcagtcggatcgattgtggtaaggtctcttgagcttcgaaactgttgttcaggctcttcgcaaatgtcgactccgcactcattgtctgaaggatgaaaacgcacatccggaccactccttgtttggaaggatccattctatattccatcgcatagaagatacatagaacaaggaagtcatgggagcgattggagtcgatgataaatgaccggaaccttttgttgcattgcaaggtctcccagaaaaggaccaacatctcaggggcccattttaccgatttttgactcccaggaagatacgaagcggtagcttgcatctagttcgatcagttagcataacttcttaatacacgagtaagcagagaataaataccggctggttcagaattctcgtcatgccatccaccaggaactggaagtcttgaggtctatgtagcctgccgaagtaatggcgataataattcttcggtggtgttccacggccatcttctggaataggatacatcaaaaggacaagaagaagttgcacgcaataaatcaccaaaatctgcctgggatctttccaaacaacgtggtcatatgggactctccacgacgcggggttatacttcatggcctgttttggattagcatagctccaccgccgattgagcaaaacataacatactgtattgagaagagagcaaaggagggtcaagacagcctgcttatcttggcatgttgtgatataagtgattgccttgacaccctgaacgggcaatgtatctataccagtcagtaaaagttagagtaccttggttgtatcagactatgaactcactagacggcaaatacatggcctttccagtcagagtaagcataagccgcagaatctcgcatcggttgctctccaatgttttgttagaccccatagccgtgttacagccgacaccactctgccaaattgaaaaagagaccttgctctttgcagttggaagtcgtgggattgtgaagtcagcaaagaagagcaagtccatcaatgtgtctatcaactcctcagcaagaggcttcaaatcttcgtaatcctccgcacgcggtgatgtcgcctcttggttaccctccgattgtgcttcgtcgaagagtacctccccagcaatctgtgattgtcttgtccttctccttctccgtgtccagaatacattatcatcccattcctccagatgctccgcctcgtaaacataggggaggagacgagtgaggatccgaatgcagttgaggacctcacgctcgggggcaagatcggggtcggggaatgagggatggtttctcaatacagtcagtcgtgatgcgactgctagtatgagtgttttgaagttgggcaaggcatgatcgcgtgtgcgtcgtatgtcagccggtgtgaaaaggctaaagacatcttcggttgattcaggaagttcccagaactgccaccgtggttagcctccaagtctccaggacatacagtcaatatgtatcagaacgtactcgggtccagtaggggtcgtctgcggggatctcctgttcctcggagaggcggaagataccctgtttgaagacaagcttggactccgaagctcccatagcaaaaggaaagagctagtagtcacgccgttctcggtttcatgcggattttcacagcaaatttcgaagtgtaagtgatgcgagggcgctttctgcctgtttatttgccgagtgctagaagtggttggcggtcctaatcgtccgggcgcgggatcttggcttgaacacggggtatggcagatagaccgaatgccaacagtacggtttacagtagacggtactccgtacatatgatgagacatcacagcagaatgatacctcatcttatatacatctccttatcctattctgacctatttgttgccatgtatcaaaaggcacttttagcatccatagggaggacggaaaaaatatccaacagccaccggtttcggtttctatgaacaacacgaatgtacgtcaaatgaaacgagcctgtaataataagcgcgaattggtatccttgaaatacattacgaatgaagcaaccgctatgacattgaacacgttaaacaccaaaaccatgaatgacccaagtgcccgttcgcaagtttgtccagaaagctggaaagaatcagggggctcctccgctagccgaaagccggcggctcctctcatatagccacttgttcttgacccccagacttcctcgttttcccataagcggggaaggtgtgcctgggcccatgctcatggtcgactctccaaaggagttacttcgagtcagaggggacgaggatccaaagctctggcgttgaatagattctctgcctccattcgacatcgctttgtaaagcagggggctggatacaggcgagaagggtgtgctgatggaagagcgacgctcagaaaagcttgcattcgcggaaattggggagggctgtctgctagcaggactggccttgcgtgaagaaagccggtatctgggtggggtaacaaatactgttccaggcgttgctggtggtgtggcagcaggatccaaaccaagaagtgagcgctgggtgggggtaaggggaatgtcggagaggtcgtccgttggccggaagaggggagagagggccactataacattgaaaacgaagaagagttggagaatgagtaacgggatttcttgatagatatggttggtatcgagtatttggcgtaagcttaaataagaccgttagcacgcgacgcgacggatcagagttcttatcgcactcactagcttttgaaggtagatccaaatgtccagctcagtatcaaagctgcgccgttccaaacgagcttcttcacatttttctgatcaaatgtagctgcattttgccgccgaacgatctcttccagttgagggtgtcgccattttccaggggtcagggtaccctctggagtgggaggaggcagcggaggtgtcgctttcggggtggaaggaagaaattgagtggccattgctaccgtggtgaagatgatgtcgagagtgcagagtgaggtgaacttgactggagactaggatcgtgaaatcagctactgatccgtagatgcgtagactgtttttttgcgaggtctttttgacaagagggattggactcactgatattatgaactagtttagtacttacctagaagggagcaaacacaagcagctgtcagttagtagtgcacgtagcaatgaacaattcttctttcaaaaagtcattattgttgttgtttggctataaattgacgatcccaaagtggctgcgctcggcgctcaaggaaggggttgcacgggcataagttgacccggccaagctgacacaccttatcgccgtgcccctcaacgtcataactaactagttgctgactgttgacacttcttcatcttctgctccccatattgaccaactaaaatggctgatacttcacttgtggagaagctggataccttggtggccgatgttctcgccgactggaatatctacactaccattgtcgccgggattgtcctcgcttttgcggtttactctgtcgtctcgtctcgggatccagatgtgcatccgttcttacttgctcgccaatcgacagcagccccaatccgcaagcagggtgaatctgctacttataggtgcctagaaaccccatatggcttacctcttcgcttcggactaaacgtcaaggacccgggcgccccgaaatggaccggcggtcgaagaggagacctacgtgatatttggaagactgctgtgcgtggagctatgaatgaggatggtactctttcgggaaatcaaggcaagatttacacggtcttgggtcgaaaggccgtcgagcactctttggacgaggtgacgcaagaaatcaatgtcatcggtcatcatctccaaacttccggcgcgaaaacggtggctgtttgccttacagactctatcgagcttttagctacaatctttggtgcgtgccttatcatcctaggtgtgagtctcgatgtctaaccttgcgcaatataggtggtgcattctatggatacgagacggtcattgtgccgcacaaccttccagccgagacattatcagcacatcttcaacaggtaaaagcggatgtccttattgctgaagccggatctctggacctttctctcgtcgccaagggtaacaatcaattgacgctcgtcctttgggttgccaagtatggcaatcaacacatggactggaacgcactccccgagaacgtcgaagatactctgaaggttgcagtttggcatgaactggtcgaggagttcaaagaaatcgctagctatgatgtgcctcagtacgacccaaagacagcaacccctgccgtccacactgtttggccgtcttcctcacaatccggccaatttatcgatttccagccagaggtaagaccagctcaacttgtcaacttgtctgatatcactttcactgacattcaactagaacttggtgtctgccatcggagcattaacctccgccctccctcgtactcagcgtttcaacccaaccgacattgttcttcctatcgactctctttctcgcacctaccctctctgcatgactatggctgcactgtttgccaactcatccatcgccctgaactctgttgctggagaggatgtcgatttcgctttggctacagctggggtgtctcccacagtcattattgcctcatctcaaaccatggctgagtaccacgacaatatcatgcgcccgcacactggtatcatttcctctcttggacgctggcttcaggcacggactttagatgcaggaaacatgccgacgcgcaacgttttcagccaattggctcgtgtcagtccgacatctgagctttcgctagatgaattgcgcttgctttgcatctcccaccgtatcgatggcgaccctgccgtccatcttacctctgaacaattgaccgaccttagaatcttcaccggggctcggcttgtgtatgccttgaccggccccggtgttgctggtgcgattgcgcaaacaaacgcctttgattatagatgcctccccggtcctagccactttggcgccccgctgagtagcactgagattactctgaccaatatccctgaagactccccttacggcacagaagagggacaggtacgtcgagtccaattccgccactttcatatagaactaacattcacgtctagatcaccgtctctggccctgctgttgtcggtggcaccgtcactcttcctgaacgaggccatatcagcaaggacaataccttggaattgtcttcctgagcgtatcaatcccaaaatagcattctttatagcgtacttgaaacttgaactgccgggacatttggtaatgagtttgtgtatatttcatcaataaatttccaactatatgtataaatgtttggctgctagttgagcctttagtagtctatttagatgtcttctcggatgacacggctgtcctacgcattgcttttatcagattgctggtgacatgataaagattacttggaagagtatgttctgatgacaacccttaaagactctcaccgtccaatatgagctctccatgcatcagaacgcatttcttgtatgggattcatatctaactcggacagcgaatgtcattccttgttcagggcagaaatcgaagtcagtatccaacaagtggttgagaacagaaagaagctgtcggttgtcggattaagcgttgaagagtcgggcagcggcgagtgttttgaggcataggcgctagaatagaaaagctcaaagttgtttgatatcgcaatttataaacacagatgaagtacaaaggtagtaatacagccacatgtatgcaaatgagggtcacgccggacgccctctaactcaatcactgccggcgattgccgccacccaagaaagccttcttctggcgaacatagttggccacaacattctccacgctgcgacggtcgtgcttgcggtctctcaagaagtacaatctcgcccttctgcgcttcttctccgatcgctggacaatctccacgctgttcacgttgggactgaagaccttgatggacatctcaacagcgacacgagtaagctcgtttcgcagaaggaatgacgtttcaattccgcgcaacttgatgctcagaacaattccgttgaatgggtcgccgttcttgaatgtcactcgtacgatatcgcccgtcttgacactgcgcgggtttcgtcggtagtcgaacatggccttgcgctcaccggtaggatcgaggactgccaattgcgattcggtaactgctgcaatggggtctttgcatgctttgcgagcagatggcggagcagggtagatcttgaggggctcacgctctacatgagatagcgaccattagtacagctcgcgtcgttgcactcgattggaaaggacctaccaggatccggacgaaagcgaagaggtatttgggataggaattgctcaggcatgtttgggggaagaggtacccgttcgggcctcttcgaataggccgttgaaatgaatcgacggttgatgaagggttggataggctccgaggcccgtagcaaggaccttaagcagcccagcgggcgcattgctggtagagccgccatggttgtgatgaggatgtcaagtcaagaaagtcggagtcgagttttggccggatcggcagaatttccgccaagccttcgattgcccgttcgggttgcagataacagcgattcttttttctcctccgattctacgataccgatccacctcgttttcttgttcttactttgagggaaatttatcattctatcagctactactctcataccctgcatagcttcatatatagcctctgatcacacatgatggcgcaaatcgccatgagcaggctcttccgccaaagcaccaccggctcggtgcgccagtctattctgagaccgatgcaggcccgcagctatggttcgaactcaggtatgtattaataaccgatctatcgtgttgtcaaattctcatcggaggcgttcggaacagtaatcccaaccttcacctcaacatcctcccccgagttagacgaagccctggagcggttccgcaatgaactcttcatacccctcgctcttcccaagcgacagagaaagagcgtgttcagagagaaatacgccaaacaattggaaaacgagccgattaccgtgaagattggcgagaccgaagagttcaccctaacgcccaagaagcaccacgatctgccatcgaagaaagacgctctcgaggttctcaagttgatggttgcgaccaagaactacagcaaccttttcccgtacctcagtggactccggatgtcaaactatgccatcaacagcgaccggtgggagttcatcattcgcaaaaccagcgcggctagcaagctttcaaccattatcgagtgtgccaagcagtcccatcgcaccggcttgactctcagcaacaggaacattgctcgccgtctgttctttgagcttcacaagacagcggcgaaagcgaatttcgagggagccccaaccgtcaaggctctgaaattggcgagggaggcagctagcctgatggatgctgatgaacactccgttcggaaccttgaggatgaccccaaacaccagcctttcgtcatcggcacgcttttggagctcagtgccgcctgtgcgaaaatcgatgagacccagataggcttagtccgtagctactctcagaagcttgatgcggcctggtcccgaggaaatttccaggacgacgcgtccactggctttgagaacatcgaaagagtcgaggagaaccttgccgtttacaacggcatgcgtttggccctcgagttgcccagggcatcacatgacactgggaatttccaggctcgctgtgataagcttaagcctatcctgatttcgcagttggagaaagtcaagaacgccgatgtgcttgcagacaatgtggttaaacaattgcttgcggacaagcccaaacaaaagatcgagacgaacgcttgagctatgttgtgattccttttggtgttgattgagccacatcggcgtgtataatactgtacttcccagatatttttgagctggctgtgtatttcacaaaaagatatcttatttctgccacatctgatcctgcaaggtgctatttcctgtcagtctcttccaatgaccgtgaacgaaacattttggtcgtagtgtgcagacataataaactagatgatcctcacaaatgcataccagatcggtcatatcagatttatcttacggtttcttccgagtgggaagtgcgagtaaagcgtcggttagggccacaaggtcacatgcatggtgctatatactactatatactacgcctccctcagctttcgataattcaacccacgtaaggtaggtctgcaggcagagatcgctaagtacggctttagcactaagcgaaccaatttcgtcagtttcatcatcagcaccgaaggaattgaggtgaatctagccgatagacgttgtcaccaactgggacttggaggagcccttaatcaccactctattttcgtttgaaaaaataaaatttgcatattcatcagcggtcgcatcatcatgagttcaattcgtgcgtattcatccatttctttacagcatcatactaactaaccgtaggactgtcatcccgatccgaccgtagaatcaaggacggtataggtcgcgtaagcgctacagctaccatacgctattacatagtattacctatagcaaggttatcgctgccccccgtcgccgttcctactggactccgcattgtcgcgcctaccgagagggagagcctcgggatcgtccgaaaacacagcactttatttctttgcggcatcatgctaaccgaatttgataggccacagaagtactgtgttctcggacgatcccgaggctctccctctcggttggcgcgacgatacggagtccagtgggagcggcgacagggacgatgatgcgaccgctgatgaagatacaaagaaaagatttcgagcgaaaacagagtggtgattgagaattggattgaatgtttactgcaatgaacctggggggatttataggagattctaatctctcccgtcgtcttacctagaagagcgtttctttgtttgcattcccttacgacccacctctggtctttgaagccggcatactgacgtgttcgctaacacagccccgttcgagcctttgagaacacgaagcgaggcttcatatctgagaaccgtttgtcgggctccttttgcctttctttttgttgattgaatacagcagtttgaatttttcttccctttttgttgttgtcgaacagagcatttactttcgccaagccggaaatacgacccgaaacaaactatataacaacaacacatgtgtttatcttgcactagaattggttatcaacacgaaaaagccttgaaaattagagagggggtataatatttgatagcacggcagtgtccatcaagtcttccacgaatataactgatagaaagcatacaataaaaagtataagcagtagggtatatagcaaaagtagcaaaacatgacctggacacatagaaatattcgtaagataaaaaggaaatgttagcccagcaactggcgatactctgatagatataaggtcgtgtgatggcagaactgggaaaaatgttccggaatcatgtcataagacaaaaaaataatatcactttccatcgtagatttggtcgggggtgagtgaaaactggcctttctggatctctctcgcatcgacttggtccggcttgacgtatctcgcggtcaaagcaaagcgcaatttgttctcaggtaccaccgaatgctgtattggtcagatttgactttcaatgttggtaaagagtagaaaaccacaaacctcgtagtatttctggagatcctctccgtgcatgacaacaagatcaccatgattaagttccatcttgatggtaactggggcctctcttcccttgcggcccattgccagagcacggcgagagtcatcataatcagattgcgagatctcaccagcatcgaactcctccttcagtgtccgccgttcaccctcaaacatgcagtctttcagaacagggtcattctgcagaagggtcccaatttgcctgggctcagcccttcgggtagagccattgaaatacttatacttcatgcggacgaacatagttgctttcgctccaagagacagtgtggcgatactgggccccagcgaggactcgccgtcatcatggaactgatagaagaaaatttagcacagattattctcaattcacagctctgacttactccgatcttcatttcctcgaaatagccgagcgtcagtagctcatttggaggcaggtatttatctccagaagagatgactgccttctcagttgcccatgacaaacggcccagagcctggagcatgtcattaggtgcttcatcgaagcccttggaatcgacagatacgacatatttgtagggcataccctgtgtaatctcgtcagatagtggacactaaaatgtcaaggtaatgttgtcacttacatagttgacggcgaaatgtgaggtcaatgtacccgcaactgtttcaatgtgagaaatatttctgaagcttggatctggctcacttacctagactggactgaagctgaaatcgtttgaggccaagatcatcacgttggagattgatgaacaggtcgtctggtccattcgcacggctattgatagctttgttggacacaaaatgggtaatcgagccaactccatcaagtttgtaggtcaactttcggtaaggaaagaaggtcttgtcgtcaatctctggagtgttaaacttccgatcaaaaataattgctcgcttgatcggggccaactcgaaatgatcgaggacgactcgaagcgaaacgggcttcatgttcatgaacttttgaaaagggcagcttttcgcacattcctcgccaatagagtcatcatcgcatttccaacctcgccagaaagttcgtcggatacatttgaaacacatagggcacacaattcccttccaggcaatacgagctgtgctaacatccgcggcattctcatccaatgtcaacaaaagatcagggactagactgtagtgtggctggatttctgggtccggaggactgcgaaagctcaggaaatcaggattgaaagtgagctcagcgggaggggaagcgttttcaatcttccagaagtcgacgcaactagggtcaaggcacatccacccatcctcgtacaagcgaatactttccgtagagcatctctcacacttgagggtttcgggctttgtttcaaagtcccgtccatgaaggggcactggtgggagagagtacttggccgcccaccagctcttttccgcgaggttcagtttctcaaagcggactttgactccgtgtttcttgccaatcttttcaaaccagacattggtaacacgaaaccagtccataatgttgtaccgatgcggaagctctcgattgagaatcttgttcttgctccctaaaacggtgattagcggattcctttaaaaaaaaccctgataaattaccaataacaaggccaacagcaagcttggagttttggctggcgatgatgctttggacgagtgaattctccgggtcttggttcttttcgagtgtcaggtttccctccgaatccttggtacagcatccaccgctaatagaagttagtataggcaagtcgttactctgaacaaggaatccttacattcgggtaatgatgatctcctcatcgatataagtgcgggtaccaccgtcagcatcaatgaggaagccataacagaaaccttcattatgatacattgcaccttgggtgcagcgaaaccagggaatagcatcacaaagttgttgccgaccctggcagaaaattcagtatatatccatatgggttataaaagatgactagcagcatacctctgaccaggctggtggtgttccataaaccggctcaagagcttgatcattgacagcaacttgctggtccgatgagactgtccggtatcagtatggtatattcaataataacagtaaaacaaagacattgtcacctttgctggcttgttctttctttgttttggcgatccggcctgttcgcactggtctttgaactgcctggcgacgattgacagtagggcgtggtgccatcttgcacaactgttgtgcaagcaagctagtttgctatgaattaagtaagtattgtcccagaacagattcaaactgccaacagaatcatattcgggagtggaggttgatcgtcagactcacagtacagagggcccaatggcatcatataaggtaaattggtgttctaattgtgctcagtataattcttcagacagtactcagctttgagtaaggatctaatgcttgagagggatgaaaagtgtcagtggatggggtgaagggtaagacgggaggatgatagagctgggtgagggcccgatatatattttgccagagcggcaggggcgaagctggcagtaaactttggaatcacgttacaagatgagctaatcatgaggaagtccattgctgatgataaactttaaagtacaagcaaatggcattatgttaatttgatatgagaaggagaccgagaaccccccaagattgataccacaatgagagcacagatttcgttgctgacagcccattgggcttgtcctaggcaggagatactcaagatatgatcttctcggttacaggtggcttgcatatgaactagatgactggaatatgggctacttgggtaaatgattaacaaggatatgcacgccataacttacttcaactccacgtcccatagcagtagattatgaaaaacacctctttacactagctatgaattacacagaggtcaccagggcaatttaagtttcagaagtgcaagtagaaatgatatggtgattcatgtgttgccacagcacacgatcatcaaagaaccagggaggctgggagtgaacaaagaactgcaatgtctttgttcaccaggaagtccagagctgcctgcatgacatgtgacattgacatcgacagggaaggtgcacggcacctaggaacttgaggaaggtacgtgttcctgggggtataaaaggtctcctccccccatttctcttcttctcttcttcttctctcctccccattcctctgaccaccatctcaccgtagcccccgagacagcgttgacagagggacccgcagtggcccatttgggaaggtacgtgttcctgggggtataaaagggcccctccccccatttttcctcttctcttcttctcctctccccatccctctgaccatcatctctccgtagcccccatgagacagcgtaggcagagggtgccgtagcacatgctgcttgacctaccacagggatcataacattaccttgtttgttatgaggtccatgtaggtctgcatcagatatcaaaccgggcgttctcgtggatgttcctgaagtcgtggctctcattgccatttgacaagtcccacagaatacatgaggggtgtaaatcttcgtagccgaggacgcgaaggtagtcaccagatacattactcattcgtctggtttgtcctatatgttgaagtattatttagtgtatttcgagaatagtgaaatgttattgtctaaatgtgacaagttgtcgtttcattctgtagataagtagataatggcttcaaaaaataaagtgttggcgccgttgaagatatcccgggagcgaaagcgggcgaatgggattcgagtgatctgcacgccaagcccacactttaaatcccacgaggattctgctgtttattgaagtttacgagacagagtgcttgattgcttggttttcgggaaaattagggcttgccattcatcgtgaaccagatttacacctagtacatccttggcagctgaagttgatggatacatattgatgataccctcggatacgtatagaccgaggcataaagtactagcggcatcgtgtcgttggagaacctcgcaggtttgccgagcttccccgcatccgtcacttttccattaaatctcccctcagctgcttccaaggttattgcctagtccacgtgtgttcgctagaccccttgtttattcgcactgccatatatatcaactgtgggtaaaccgtaagaccccattgcgctcacctggctgcagctaacctcattccaaaaatagccgagaccacgtatatcatatcgctgcaactccgagaaactggaaaaatggtgtttttgccggcaaaggatgcgggccaattggagccaatccctgacactatcccaatcagcgagttcatgctcaatgagaaatacggacgagtgccacacgcaggctcccgggacccatacacatgtggtctcagcgggaagtcatactcgtcgcgtgaggtagctagtcgcgttgactcactggctcgtagtctttcaaaggaatttggttgggcgccaaatgaaggatcggaatgggataagacactggccgtgtttgccctcaacactgtaggtgcaatatacaatagcaagaagaatagaacggagcttattctttcgtcttgccattagattgactccttgccgctattctgggccgtgcacagactaggtggtgttctcactcccgccaacgcctcatactcagcctccgagctgacacatcagctgcttgattccaaggccaaggccctggttacttgcgttcctctcctcgccatttcactggaagctgcggccaaagctggtctcccgaagagcaaaatctacctactcgatgtacccgagcagattcttggcggcgtgaaacctccaacagaatataagactgtttccgaactcatcgaggccggaaagtctctaccgccggtggatgaactgcgatggagcgcaggtgagggagctcgacgaacagcattcttgtgctactcaagtggaacgtctggattgccggtaagcagtgcccccaacaacttgaataataactttggctaatcatgtgctgcaaaaaaaaaagaaaggagtgaagatctcccaccgcaacgtgatcgccaatacccttcagatcaaggcatttgagcagaaccatcgggatggcggtggcacaaagcccgcggacacagaggttgctcttggtctccttccacagagccatatctatgctctcgtggtcattggccatgctggcgcataccgaggcgaccaaacaatcgttctccccaagtttgaattgaaatcctacctgaccgccattcaacactataagatcaccacgctgttcttggtaagcatgtctttgctgatgagaagctgtcgaatgctgaccacaatcacttaggtacctccgatcatcattcacatgctgggcactcaagacgtgtgctccaagtatgacctgagctccgtgcggcttttgttcacaggagcagcacccttgggcatggagacagccgccgatttctccaaattctacccgaacgttttgatccgccaaggatacggtatgtggcattggcacttcttacagatacagagccgaaactgatattttcacgcacaggcctgacagagacgtccacggtcgtgagctcgacccacccgaacgatatctggctcggttcatccggtgccttcctccctggagtcgaggcacgcctcatgacgcccgaaaacacggaaatcacaacgtacgacacacccggcgagttggtggtccgaagcccaagtgtcgtgctaggctatctgaacaacgacaaagctaccgaagagacattcgtggacggatggatgcgtaccggagacgaggctgtcatccgcgtcagcccgaatggcgtcgagcacgtgtttatcgtcgatcgcattaaggagttgatcaaggtcaaggtttgtgatgccactggctgatggaaatgttcgcagtctaacacatcattcctagggtctgcaagtcgcgcctgccgaactcgaggaccatctcctcgcccaccccgatgtctcggattgtgccgttatcgccgtcccggatcctcgtgcaggggaagtccccaaggccatcgtggtgaagtctgccaccgcaggatcggacgaatcagtcacccaagctctcgtgaagtatgttgaagaccacaaagctcgccataagtggttgaagggaggcattcgatttgtggatgcgattcccaagagcccgagtggtaagattcttcgccggttgctccgtgatcaagagaagggggcacggagaaaggcaggtagcaagatctaaaaagtttcgggatggctttgttggaaacttggaagaagcgccaagaaccatttcggtttagaagtatatacgttcacgggtagatagttcacaatcttcaatataatagcttgttgtattgtactatttaccgatagttattaatctctgttatgtaagtttaagatgacgagatcactggttcttgaagcccttgagattcgactgcctcgaggcttcaagtatcatttaagtggccctgaatgataatatagtatttcaaagagtaagtaacaaagctttcaagccacttggacattgctatctccctgaggggcctctcgagggactgcctgagggacttcctggggggctgtctggggagctgtctggggaactgtctggggggctgcctgggctgtctgtttgctcaggatttgatcaactgcagctgcaaggccacggcacagcccagaccaggacttgcgttttgagaaaatctggctcacctcggacagcagacgcaaggagcttgctttgcctgtcagacttccgactccaactaggttgagcggagtgtttgggccttcggcgatccaaatatgaatttccctggtgtctaacaagcgaatctccttagttggggcatccggctttttgatctcaggatcgaccacgagctcgtcgaatgcccatatatagaagaaagcgataaggaaacagagaggatcatggcaggaaaatttctgcttggctttcaatgtgctgtaaacacatacagcatgccacagacatttcctggcactaggtgcattgttttccatccaatgtttcaggatacttgttgtcgtatcgacctcggcttcctcgccttgccaccctgagaatgactcgagcatctgaagtgatacttgccggagaagagacagtatatgatgaatgacatctcgagcggcaatatagtctggtttggctgaggtgggaatggccgcgaatatctcgttcatggaccgaaacatcattgcgcgcagagcagaaggggttgatgagatatggtcccatcgctcctgaactggcacgccggtcacttgagaacttaggcccgatttccaaatggaagaatacgacattttgtcaaggaacagtctctcctcgctgtaaagagacagcatgtagagatttcggcggtaagcatccattcctgccatggtttcattggcttttctgacatcaagttgagtagatggaggttgtgatacatctaaaagttatggtcaatcccggagatatctgataacaaaaattggctcactttgatcagattggtatacatggacgaaattgtcggcatttctacgacaccatagtgattggcgacaggggaactcctcggggagttcatgctgcccaaatatcggctgacgatcaaataaaatgagctgaagacattcgagttctggcgaatggttagccaggctttcatagtttgtcgcaaggggcacatacgaaagatacaatgaagtaaacgtatacgagattctcttgccagccaggctctccactgtctcggggcttgtgacgtttttgttttcatgcattgatcaaccttcaagacacgggccaatgtgacgagtacatttcgctcatattgcagcttcaactgcgctttgtgcgacccgccaaacatcaggcagacatcactaagaaatacgctttgtgcataggataaagttgttgtttcgggtgattgaggttgctaatttgattaatataaggtacgaatcttcaccaggagatgaacttacgttttgtgctattgcctgacacaatatgtcgccgaaagatgctgaaaattgactggcattgccgaaagcgctatactgactcccaacagtgaccactgctaaaagtaccatccacgaggttttgtcatgcccaaattctagagcatatgggtgaaccacggggtattcatgatcgaagtgttcaaaatacaagtgcacaaagtcttggatgaccctccaccatggaaatgtcgcatcttctgtttctcctaggctcacaagaaatgccttaagtgattcatatattgagatgttggtcatcacgctgtaacgaaattcaggcaacaaaaatcgctcatctgaacgccgcatttttggaagtgacaatttcaactggcgggttgacttagaagggctggctgcagcaggagccgcaggggcacgagcacgaacacgagaacccggagccgaaacacgcggacggccccgtggacgaggagtcttgggaggtggtgttgcttgcgatgctgggccattctgatcattttccgagtcgtccgatatttccatgacatcccgcgaggcatccatggggtcctgtgtagtgaggtctgtagcaggcacggccggacctggagtagtctggtttgttccatcttcattcaatgagaaagatgatgtacgtatgttagatgaggagccctggtcttgaatattctgcggagataaaggactcgtctggtcagactgctcttgttttatatcttttccttcatggtgtttcctcaaatgagccgcaagcctatgtctgcgggggatcagaattggaacgtcgtatgaataggaagtgcctgcagcctagagactatggcataccttcgagtataggaccttggacaaaaacggcatttaaactctttcgaccccgagtgtccccggtcatagcattgttgtgacagtgctgtgccgcattggtcacaagtaagatggagttgcgggcgagtatgagttaggatatggcgtttcagatggtgtttacgcccgaataccttgtcgcattgctcgcatgggtaagactcctgcaaggggttcatggcttcttcccactctgaagcacatagatcaattcaaaaaatcaatgcaacctgcaattaaacagtctacaaccaggactgtggccatatattcacaaaaaatccagtaaatccagcaaacacctaccacgacgctatttcgcgtgtcgcgctgacaccaaagcggtcactaaagcggtaagagacagagcataatctgccgcggggtgtggatttctaagcggggaggtaagaaaaaaagatcgagggcattttaagttgccttaacaacctacttcttgcttcaagattgtttaggaacagcttatatcagaagggactgttaataaatcactcctttcgacttcatatctttcatatcgcaccgatccacggattgaaaaaataataatgtcttcaaacgacccgcaccacgagaatgaagaggactatatgcaggccgacgatgccgaagagatctttgagcgggatgaggatcaccctatgtcggagggagaaggagaatatgatgatgagaacatgaccattgaagatgagatcaccttccaaaacgactcagtggcacacttcgactcgcattcagactccgtattctgtgttgcgcagcatccggttcacaacaatatagtcatgaccggttctggtgatgacacaggctacatcttcgattcgacccctgcaccgcgtccagtgcttccatcaagctatgaatcaaaccctcagccaaaggagcgcgagtctctcgcgcctctggccaagctcgacggacacactgacactgtgaatgccgtgactttcaccgaacccacaggagagtatgccattacggcaggtctggatggcaagctgcgagcttatcgggataccacaccccagaagaccggactcgcatgggagttctttggcgaggtccaggaagtggaagagatcaattggatggccgtgtgcccctaccagcagggaaatgaagggactcaaaatgttattgccatcggcgccaatgacggcagtgtgtgggtcttccgtatcgatcataccgaccccgggcagcctatctccatcatccagaccttcttctcccacaccgaatcatgcactgcaggcgcatggacgcctgatggaaatctgctggcaactgtttctgaggacgccagcttctatgtttacgatgtctttggagctgctgccgccgctggtatcgagtattcccaaggcactaatgccatccttggattgactgcggaggatcagcgcttcgctgtggagggtggtctttacaccattgccatttcccccagcggcggtattgctgcagtgggtggtgctgagggcaacatcagggtcgtcggccttcctcgggtcacagcaagtgtccctgcagccaagggcaagggcaaaggcacaccctctcaggcagccggttccaccgctgcaggaactatcatggccgcattgcagacccaaacggacaacattgagtcactgtcgttctctcaggccccattcactcttcttgctgctgggtctgtggatggttcgattgtgatgtacgatgcggctcatcgatttgcggcccgtcggcacattcgggatgcccacgagggaagcgccgttgtcaaggttgagttcctgcctagcagcaagcaactcggtgcaactgtctcagggccccttgccaatgctcccgcagcccaccagaaccgctcttggatgctcacgtctgtcggtctggatggtgtggtccgacgttgggacgcacgtggcggaactgccgcggcttcgcaaggattgatgcaggagtggaagggacacatgggtgccacggaaaatgatgagggcgagcaagccggtggcatcatgggctttgtacaaggcttcgatggaaagcgtattgtcactgccggtgatgatggtatctcgctggtattcgaggagtagcctgcacaaaaaaagtttgagaccccaaatgcatagtgggggttcatgtcgataatgatattacgtgtttatagaagctcacagccaaaccaaccttgataaacagctcatgatatacaaggcaaaatccctgtagagtcgatgaccgatgatcgaacaataaagaaacatggttgtagtagtggaacaaaagctatgtacattcgacaaatcaaacccaaagcgccatctggaagctacgctccgtatgagccatgagaagctgcatctccgccctgacgacaaaagcccccggacttggcaaagctgtaggcgctataatccaaaactcggctgtggttctcgcggaggcgagacgactcttttcgtcgcctggggtatagatcctccgctcgataatccgttggtcggcggcattctcaattggtctccagagacgacccattagtggtgctcttcaccgtggtgagcatcgccatggtggtgatcatccttcatgaagaagtgctcgtatgtgcagtagccagcgaaagcgacagtcgcgataccgaagccggggaagagacccttgaagcggttgaatctgctgaaggggccgcagtagcgccaggtctcactgtaaatattagtgactaccacaattggaatcacatcggcatcacttgacgtacttgcgagcccatggatcccgcttggcccagatggaagatggggaggccgcggccttgtagtcggccatgttgaaaccggtggggttgggggcgtgcattgtgggtgttatcgggtagtcaatattacttaaagacggaaataaagagaaacaagatgtgagagactgcaaattggtccctaagtccgcaatcaaccgcaaagtgacacagtgaggagccgaagatgaggaaaagaggtgtgcttggcaattacccgcgctaaccgaatacggtacaccaagtagctctcccgccttcgagggacgaaactgtcacttcatccatgcgcatcttcgagacaacaaaatgccacctcccgttggcagatatgggccatctggcttgaacgctccatacaacatacagcaagctcaccttcaatctcaacatcccgcacacgcacagtctgggaatacgctacctcccccttcgcttggtcaccctggcttcgcgggcaatccaaataccaacatcaatcctttcacactatccggcggaattgcaaatggtatggcggtggccggctttccgggggctggtgcaggtgatggtggcggcaccggtctggcgagtcatgcggcacagatgggattcgcgcgcggtgcgcaaatgcaacaacagcaactacaccagggtcacgacggtcgattagcactcgaagcaaagggcgctgcggtaaagtcaaggattagagatgtttggaaacacaacctggcccatgagatggcggttctgagacagttggtcgacaagtacccttatatcagcatggtaagcaccactacgtgatccgtgcgaaactgaagtcttctgagagtaacgtttactgactaagacctaggataccgagttccctggtattgttgctcgtccgatcgggtcattttcgaacaaagcagactaccactatcagaccctccgatgcaatgttgatctgctgaagatgatacaactaggtatcacgttattcaatgatgaaggagaggttcccccagcttcaggcaatgatgccaatgggcaagtatatggtgtgcccgctccctgcacatggcagttcaacttccgattttcactagaaggagacatgtacgcccaggagtcaacagctatgcttgctaaatctggaatcgatttcgccatgcacgaaaagaacggcattgatcctttcgagttcggtgctcttttgattagctctgggttggtgctgctagatgacgtacactgggtatcattccactccgggtacgactttggctacctgatgaagatcatgctctgctctcagctccccgaaaacgaagaggagttccacaagcttcttaccatcttcttcccgtcactttacgacatcaaatacctcatgaagcatgccggtcgcaatcaagccgtcaacggttctcctctcacgcaggcggcagcacagattctgaccaatctaggccagaaatctggtttgcaagacattgccgatgaacttggcgtcaagcgtgtcggaatcgcccaccaggctgggtcagattccctagtgactggcgagatctactggaagacgcgccagctcattttcggaggggaaatcgacgacagcaaatattccggccaaatctggggcctcaacggacaaatgcccgcagtggcctacaacatggcccagcaaacgccgaacctcaatggtgccaccatttactccggcggaactcccagcactcccaatactgggtctcacggagctggcgctcatacacctcagcaccacggcgctggctacaatgccccaactcccggagcctatcaaatgggccgggtatgaggcacagtctgtgtagcacctgggttgatgtgatatgatgtatgtacatagacacgagaacatcgtgttattttccttcgatattcggcattgtcttcgcgcatattactttgcatgggctctctgtctgtgctaggttctgcgtctagacgacggtgttgggcaggaaggtgcctggcgtttgatatggctggttttgaatccatttacgaggcgttgacaggctctattatggccttgggcctttcgttcttgtgatctacgtcgctttttgtttctttcttgttgtagctagatcggacctgtctgtgtcctatgtataggaatcatggtttctgttcgctcaatttgcctggttttgtagatttatgagctccttttgcctgtccatatctagggatctgctcggatgagaggtccgcagttgcagatttaattgaggccaagcacacgttcccaattgaggattctcatgcgacatgcctgttttctaccccgcgatgtgacaaacgacatgaataacgcatagacgatagctgcagacaagcatctctttgccgttttgggattggagataccacgctaaccccaatcaggatatcagatccggcctccgcaaatatctatctaatcgatagaggtataactgcagggctcgggacattttcgagataccacctgcttgttaaatagctcgcaagcccagacctggaggagaatcaagtgagttaattgtgttcaactcttcagcactgcttgactcgaattggcactttaccctcatcaccttgaagtcatctccttccatatacctctagcacagcatggttctcgaccgactacaccaattgactcaccaggtcagcgctactgcaccgccacctcatccacttgatcctctgtctacggtggaaattgatgcggctgtcaacattgtccgcaaagaacatggctcgctcaacttcaatgcggtcacactatacgagccccgcaaggcccagatgatggcctgggtggctgatccagaaaatgcgcctcgtcctagccgagccgctgatattgttgccattgcgcctggtggtaagatctacgatggtgtggttgacctggaccagaagaagatcatcaagtggcagcacacaccgaatgttcagcctctgatcactatggaggatttgcaggaggttgagcatgttgtacgcaaggatgctaaggtcatcgagcaatgtggtatcattggaattcccaaggaggatatgcataaagtatactgtgaccgtaagtggacttccctcgtttgtcaaagattgatattgaccaaatggtattatagcatggacaattggatatgatgagcgctttggaactggtgtccgtcttcagcaagccctgatgtactatcgccctcacccagacgactcccaatatacctatcccttggacttctgtcccatcttcaacgccgagaccaagcagatcatccacattgatgtgccgtctgtgcgaagaccgctcagcaaggcgcctccaaacaactaccacccggcctcgatcgaaaaagaaggaggataccgaaccgatcttaagccaattcacatcacccagccagagggtgtgtctttcgaggtcaaaggacgcataatcgaatggcagaactggaatatccacgtcggcttcaactaccgggaaggaattgtcctgaacaacatcacattcaacgacaagggcaatgtgcggcctgtattctggcgtctttcaatggccgagatggtcgtgccatacggcaacccggagcatccccaccaacgcaagcatgcatttgacctgggcgagtacggcggtggatacatgacaaacagcctgacattgggatgcgactgcaagggcgcaatccactacatggacgcagcattcgtcaaccgggcgggcgctagcacaatcatcaagaacgccatctgcatccacgaagaagatgccggcatcctattcaagcacaccgatttccgcgacgagtcgatggtcgtaacccgcggccgcaagctcatcatctcgcagatctttaccgcagcaaattacgagtactgcgtgtactggatcttccaccaggacggcacaatccagctcgagatcaagctgaccggcatcctcaacacttacgccatgaacccaggcgaggataccaagggctggggaaccgaggtgtaccccggcgtcaacgcccataaccaccagcacctgttctgtctccgtgtagacccgaacatcgacgggccgaacaataccgtcttccaggtagacgcagtccaaggacccggtgaagtcggcagtgccgagaacaagtacggcaacgccttctacgccaaaaagacaaagttctccacacccatcgaggctatgtccgactataacgggtctaccagccgttcttgggacatggccaataccaacaagctcaacccatacagcaagaagcccgtcagctacaagctagtcagccgcgatgttcctccccttctccccaaggccggcagcctggtctggaagcgagcaggcttcgcacgccatgctgtccatgtcaccaaatgtgagttttgcaatttcccccttctgatatcgtgttccttttctgacttcattctctagatgacgacgaccaagtccacccagctggccgccacgtcccccagacctccggtgagccttcggagggtctgccggcgtggatcgaagctgctggccccagctgctctattgataacaccgacgtcgtgctctggcatactttcggtctgacgcacttccctgcgccggaggactacccgattatgcctgcagagccgatgacacttctgctgcgcccgcgtcacttctttgaccgcaatcctgttctcgatgtgcctcctagctttgcgcgcacacccacgcaggtggctgctaatgcgagcacatgtgcctgcaagaagaatgatggctccagtgttttggtttgatttgagattagacgttgatttgggttattgattttctcagcgtgcacttcttgtatatacactttttggcaaacgaaaatgattactgattcttgatctactttctgatttgcgtgcttttatatagcaggtactccgtagctgtgggcaattagggcaactaactatagatagcccactgcggccactttatctcattgatatttcaaactcattcagactgcactcgtaacaaaaaaaaaaaaaaacggagaaggaaagaagttgtaatgtcttttaatacgagaacagggaaatccagagatatgcatatcagagtataaacctcgcatgaacgcctcgaaagatcccaacaacaagggaatcatgctcagaaccaagtaaaccataaaagcctcgacacaatgcctagccaacacgcagaaacaaaaagggcagctgtgcaagagaaaacaaatacacggatagagcaatattctatgcggacaatccccgcaacaaagccctatcaacctccccgagcaaggaaaacaactccttcccaccctccgaatccttcccttcgatatcaagcgacttatgcaagaacctgcgcgcctcctcatagcgactcatttccgcaagacacttagcaatccgccaccaagccttgacattgccaataggcttcgagtcaacactagccttggcatcaaccaacgcgtcaggccaggcctgcattgccatatgggcctgtgcgcggttcgcataaaggccggacaactcctcgcgcgcaacgcctataggctcccagcccggccggctcagcgccatgtcgatggcgtacgagtatagcttgattgcttcgtcgtagttggatttgcggtgggcggcgttggcgctgtcgcggagtttgctgatctgcgcgctgcgcttggggtttacaggcaggggtgggggtgggatgttcggggggtcgaggctgattagggcgcggtgtagttggttgagttcttccagttcggcgttgattgcagctgtttgggagggtgtttgtgcggaggattgtggaagtgagagcgctttggtgctggggtccatgtacaatgggtattggttgtagatatcgatttcactggccattttggggcgggggagaccgtaggtctcggttttggggttgtaaggtcggtgttgcttcttggagttgttagtatatgcgctgcggtgtgcctgagcgggtgtttggggtgtggaatggaaaggtgtcattgcggaaagggttaactcatacaaggtatagttcaggatacgctgtctagttgttcgacaagcaaggttcactatgaggtcaatattcgtggttgtacttgtcaagagatgatgatggcaagagggcaagctgtccataaacccgctgataggaaaggcggtggcagaataattgtaccttgtagagcaggtaatagaaaggtgaatactactatggcttcatactgaccaaaaaggatcttgtttgaatatattgacaagatatcagccttcgagatatcatctacgtacgttgttgtgtatcaaagtattttcacctacaaaacacagagacatgattcacaaatgcaatacatgatacatctatatattgctagctccaatgaaacaaaagcaggacatacaatcgtaatcccagtgccaaaaaaagctcgtgagaaacacagtaaagacggacatcagcccaaagtaaacagcgatgcgccaacaccgcgctccatggtcaatattcaaggcgcaaaaaaaacaagacgactcatcaatcatccgggtatttcactgaaatatgcctccatgtacaccgacaacactccttactcaactcgcgtgccgtccgtacccactcacagatgagccaccaaacccagtatgagcggtgtattcagacggggtgtattccgacggattgtaatgagtagacggctcgtactgactagatggctccacatagtgctggccatgcgcaccaccgtaaccagtactgttataatcatggaggacgcctccaggggcggtagcggtgggatcgtaggagccttgcatcgcggtccggccgtgtgcgttgcctaggtcatccacctcactctgatgcaggagggcatagtcctcgtcctggtcgccgagggtcgatgggcccatgttgccgcctcggccggagcggatatcgtcctcgtcctcttcgaagtcctgggctgggttcgatgagaaggcggctttgctctgtgcggcaaaggtgggatcggagacggcgtcggggagggtgccggtgcggcggaagtgcgtgacattgcggaaggacatccaggaggtgatggcgaagaggacgctttttgtatgttagtttcaccaaggaatcgttggatcggcggaaggaatgcacgtacaagatgaaaacaccgataattgtagttgcctcgctcagcttgcacttggcagcgctgccgtatccccagttatcgcatcccgtcttggtggtgttggtggtggtagtggtggtcgtatcatcggctctcttagtagtagtcttctcgtcgtcgtcggtggtcgagcccttggactttccttgggcgacataggaagcgagacagatccacgcactgagccagagaatcgaataaaggatgtcaacacaggcgaaggcatagacgttaccgaagcgtcgagctcgtggccacatgggcactgctactagatagaccaggccaggaatactcaaccagcactgccatgcggtcgtatgtcagaatgcaacttttttttgtatcaaaacgcaaaactcaccaaaccccagtaccagcctgtgcgcccatctatgccatctcctttggtccagatagcgatggtcaaggcccatgcgaggaagataataaatccttgtatgaaatgtattatattcttcgtccgcccgaggctgccgcctgacgaccgcacttgaaacatgtcttgtgtaggagcgctgcaagggtgttgcgctttttgtattcggagggaagggagtggttggtgtcgtctatcgtgaagtcatacgggtcaaaaaagatgagagatgagacaaggctgaagaatgagacccgatggggtcttggcctggctgaagctccgtggagttttgttttgtttttgttttgttttccagtcgcaacgtcgcaactgtgcgattatttagatcacaacgatggatatatgtaaattaaggactttagatattcaatccgattgatttgtctctctgccccatcctcttatttctacagggcgtacgtaagtcctccacgtccgctgcccaggcgacagcccgttactattttgggaacttcgccacactctcttttggcttatgcgtatcattttacatcatagtctcgtttctcgtatactcatgttaacatacataataaaggaaaatcaagccaaatcaagccaaatcagtcaatcccgcctctcgtgttcgttttatcaacacccagatctcccgtaatggttgatagacatgtacatgccaccaccagggaaccggatcaagaatagagaacagcggatccttccagaacagcagctgcactatttctacctctgcaacttctagagctgtgagtgccatgcgaaagaccggaaacttcatgaaagtagcaggaataatggcggcacgggcaaatgctggcgctgaatcggttgatgacagtgtggctgtgacattggaagtatcgactcgattggatgggagcacagatagatagcctgaaacggggcaaggtacattgtatagcggatgatccacaggtcttgcgccgagtgtacagccggcgatgtagatagcgtgtcggacagaatgcgcctcaaactcttcatcgaccatgagtctgacgcagagatgacccgtcaaacgaacatcacctttggttaccaatttctgcatgaggctatggatcgaagctgccagagccttatccaaacgcgatgtaccccacgtaaacggaccagaatccgaaaaccgaactctaatggcttgaacgtggccacgcacaatcagtaggtctgcgaatagctctccaagacgagattgttgctgcagaatccaaggctggtccttggagatctggatctcgctgatcgccgagtatgttttgctcagcgtagtgctcggcaacagtatagccttctcactcgcagatgggcttgctcgtgagatatgataggcctttgaaggcgaccggtgcaaaatcttgtgcacagagtcgcgcgattgaaccctgtgatgctcaagcaccggaaggcctttctcgatcagatactgcctgaaagaatcaggatggccgaagcgaattgcgcaggtgacatcgaaggtgatgcacgtgcagctagtgtaaccctcaatgagctgtcggaccatcgcatcttccacgggggatgccttgggcgaacacggaatccatatgtcgacattttcgcggtggataatgtcagcgacccgggacatgtaatggtccttgggaatccggtaaaatgccaccagagccttggacatgctcccaccggagcgtacgggcaggtccaggtctgtaatatcggctccaaccacgcgatggccttctagagcccaagaccttgccagagtcagaccgtgggctgtccctatgcccgtgataaggactgttttcggggaaaagttctttgaacgtcgagtggctggtcggagataggctatcaataccgcggccgcgagaatgatgttatcgacaaacaacagcgataatgaaaggcatactcgaaggatatgccagaatactcgtgacatagtacccgataaggctaaagctttggcagatttaatcgacatgctgagtctgagtacaataatatcgaggattatggacctcgaatgagcagcctcgagtacttatagtagggcattatcgctggcaaggcgtcgtcgctggcaaattgtggaactgtcagttggaggggttggcaccactgaaggcccgtgaagggggggggggttgggctgcagatctagtgccgtgtgacgatgcatttttcgcgttcaacattccagcacttaaatagttcaagacccgtaggaaatccgtagaagatcaagacctctgtacaaattgaccaagagcaacctacaggtacatatatgcatgtaggtaacgtgcgtctcgggtctaaccgcaggatgtccggcgatcacatgcgatcaacgtgggatcaggtttccgatcatttcccagttgtctcggcgctgattccctgaagggatatctccgaggcgcaggagcttggcctgaaagggtaacgccatcgactggtgaatggtgaattgggcgtggtccgactcggatttactgtctctccccgaagtattccagttatccccgaggccgtttataaggtcgcatatccgcatggaatggattgtttatcagattccgtctagtttactgcacgtcatgtctcaaccaggtcccgcggtaggaattgctttttgattagattgagaaatgaacgctaactcatactctagagcgacgccggcaaggagctgaagctcctgcattacatctatgaacagccaaatctggatgaaatccgcggccatccccaaaaggtcctcgatctgattcacgagtttgagaaaaactaccattttatgaacgtcggcgccgagaagggcaaagtcgtcaccaaactcatcgatgaactcaagccaaagaccatgatcgagctcggctgctacgtggggtactctgcgattctattcggcgacgcagttcgtcgaaacggtggcgaacgctatctgagtctagaactgaacccagagttcgccgcaatcgccaatatgctcatcgagctggctggactgcgtgactttgtgcgtatcatcgtcgggcgaagcgacaagtcgctgcacaaactactcacctcgggcgaggtgaagaaagtggagcttctcttcatcgatcattacaaaccggcgtacaccacagacctcaagctgtgtgagcatctcggggctattgtgccgggttcggtgctcgctgctgacaatgtcatctacccgggcaacccaccatatctggaatacgtccgtagcacggtcgaacagaagcgcgaagcggcgaaggccgggcctgcgcaggcgtataatactaccgggatggccgaacgcacggtagagtcctttgtgggtaaagatgacgtgccgactttccagtttgtcgggaaccccaacttaatatatgagagccagctatgtcaacccgagggattgcgggtatgtttgcatgaatccccgagaaatttccgtcgctaactgcaagggtaacaggatgctgtcgaggttacgaggtgcgtgggggtgcaagaggcttagatggcgcatagccaatgacgcaagtgggatgatagaggggcagaagccaagatgtcaagaatagaagaagaatacggagtacccgtggactccatatgattatcaaacaggcgcagagtgctccgagtagaaagttgtatgtacagtcgaccattacccacttcatcggaaccggtaccccatcggaaccggtgaaccccacccgttgccgccaggaccttcctatgtctccgctgaatgaattccgggggccctataaaagggtctcgatacccactgattacccctcaattgaatcacaatcgatatctcatcatggctaagacttacaacgtcggtattgtcggctacggcttcagcgcgaagatcttccacattcccttcgtgacggaggttcccgagctcaagctctacgcagttgtccagcgcacaccgaagcaggatgacgatgccgagaaggaccaccccggtgtgaagtcgtaccgtagcgctgaggagatggtccaggaccccgcagtcgacgtggtgatcatcactactgcccccgactctcacttcgcactgtccaagctggcactggaggctggcaagcacggtagatgcccagaaatcccggatatcagttggtatatatactaacgtggaataatcagttgtctgcgagaagcccttcacccccacttccaaggaagcggatgaactcgtcgcccttgcaaagaagaacaacaaacagcttgccgtataccagagtatgtctcgtcacctagcttatccaaacctctactaataactgcctagatcgccgcttcgatgccgactacgtgaccctctccaagctcgtcaagaacggctcattcggccgcatctccgagtttgaaacccacttcgaccgtcaccgtccagaggagccggccaactctacctcatggaagaacaaggtcatccctggtggctcagcgatctatgaccttggaacccacctccttgatcaggtcgtgcatctgctcggactgcccgcacgagtaaccgctttcattggctccgcccgggagcacaacacgacttcatacgaggactccttcaccgttctgctgcactatgccaacggcagtatggttaccgccaaggcgactgtggtcagccccgaggaagagcagctgcgcttctgggtgcgcggtaccgagggtagcttcaagaaggtgagagcaatctactcacgtagatcactgcgatgtaaagaaatgtgaatgctgacctaattgatagtaccacctcgatatccaagaagatcagctcaaggccggcatcaagccccaggataagggatacggtcgtgagcccagtgagcgttacggtactctgacaaccatcaaggacggcaaccccgtcaaggaggtggttcccaccgtcgagccccccacttacaccgagtactaccgcaagcttgttcgcggtcttggtggcgagggtgaccttcctgctagcggcgcggaggctgctcaggtcattcgtttgatcgagttggctcgtgagagttccagcgttggacgtactttggacgtctaagctgtttatgcaaataatgattatgatatactcgataaaggcaaccttgaatatacagtgaatcttggatatagttctttgactccaatacacatcatgaatacccttgcagtcggaaaccaaataattagcgttacgcaaagcatctcgacagccaaaactattgatgtctaataattcgtcttcgtttagatatacatgttcatgttcatattgctgcctaacaagggcctggatgcgcaccgtcacatggtctgcacgaggggtctgagcagattttctcttcgaacgggaagctttccaacttgtccctgaaggattgaatcttgggctaagagatattgtgatggacgtcaaatcactaccagagtttcgattcttcccatatcccaaacatccatccgagtctcaagaattactaccagatgatccaattaccctcaacacttcgtcctcatggacttactgcggacccctcttgacccttgagtcatatagcctgccatcatcctttaccacctgggcagatgccacaatcaacggctcaatattgccctccttattctccttcctggcatatgtccacgaattcctggccaaaaacaaccaatcccactactggctcaccatcagagcaagcaaaagctcggacgagttcgataccccacgctggcacacagacgatttattcttctcccccctccaaccaagaaaccattcaagacgtgaatcgctcttctcgccaatcgctaatctactcaaatcgccttggacaggctcaacaaagaaccaaaagccccaaccccgaatcttaccctccaaaacaccaaccaagcatcacgatcacccacgtcccacatctccaaccgcccaaatcccctctacaagccccgccccaacaaactggaaactcacaaccaccctcctaggccccggaaccatgttcatcccaccggcgacgaaccgcctagcccgcaccacacaacaagccgccaaaacagccgcccgcgccgcagacccaggccacgtatgtgtctccgtgcgctgcgtcgggtgcgccatggcggccgagtcggtgcgggcacggctggtcgttgagctgggtgggcacggggttgtgcaggcgtcggcgggggagtgtgttttcttccgggttggcgaggacgatggcgcggtgcattctgagcctcggtcgcatggtgatcgggtttttgttaatgttgtccctggtcatgaggcggatcttagggcgctgatggtgaagtgggggatggagtatccgcgggcttggtgtgtggggttgccattggtgattggggagggagaggagtgtttgagggatgttgggggtgagatttgattgttttgtttatgataccctggaagacatatctctattatttagtatagacgggtgctctgggcgtatatcgcaatagctgggaggtatgagtttaaggcagtcaattgcattcttttaccctagtgatggtcatttcagttgcgttgacccaagaatagccttaagtcttgcacgaagatccggctaatgacgatatgccaagccgctagtcccaaatcgtagtttatgttaccaaatgcaaatccactgagtggacgagaaattagacctggcatcgaccttgggagactcgatatccgcggagaaagagagaaaggttgcgttttagaccgcagaaggaatttctcactaagggatagcggtatgcggcggataggggttattcctttctattcccgacaggggtgaatccaacatcgagatgcgttacatgggatttggtgaaacccaccagagcctacaatatagagcatattgtgcccatcgcataagtccagcatggcgacatccctgcgtgaaccgatgacgctatcccgtccgacgacctggaatttcgatatcgatcgatatctgaatccctttgtaccggcgccacgatggcatctcgtgccaaggcctgttgcatatatgctgggatatcgggatagaccatccaagccactgggcaatatcgtggtcgccttttgggcgtcgattggagcgttttgcggggtggccttggtggcatctgtttcgaaacgggttccttcttttaaagcgcacgatgcgacaacgatccttggcagttttgtgagtcatggtctaatgcgagagtagtggaacaagaacaaccagggctgacttgatgtctctttgatgatgatagggtgcagcggcagttattgaattcggtacgatcaactcgcccttggcgcaaccacgcaatgcaatcctgagccagatcatcgcttgtttcttcggcgtcggaatatcaaagttgttcgccttggacccgcgtgctgaagcgtataccgagctcgggggcgctcttgcttgcgctcttaccacggcttccatgctccttaccaatactatgcacccgccggcgggtgcgactgctcttctggcagtgacgcagtctcagactattgctctgggctggtttctgtttccggttgtgttgcttggagtcgcgcttatgcaggctgcggccgtggtcattaataatgtgcagcgtcaatatccgctgtactggtggacgtcatatcctctgtcgcctcggggagatgtggaaaaggctagtcgaaaggaaagactagagacacctagtgaagatagtctgacgggtatccctcggcggctggtagtagaacagagtgaagtttcggtgcctgatgggatattgctctctgccgaggaggaagatgtgttggagaggatccgtaggagactttgaggggaccatacatatcaaacctcagctgcatgtaatctctccaaatataagccctctccagggccctgtttcacacaaatcaaaagtggcaaattgacacctcaggcaccaaccgcggtgacgtctctcccaatcagaactgacttatcccagcggcccaccaatggatttttttttgttcaaacgtccgtgaaatccttgaacttgccaactcactcctctcggccaaataattaaacttataaagtgagaacaggtcagttcgactctcaatttcttattttctcccgtttctcgactgacaatcgataggattctatcgataagggcaaaccaccaactccactgctcgacgcccctccatttctgtccgccccgccagacgatccactcagcctttttgcatttctcttcaatctctttctgcattgtcatcctttctcctttccctccctttacctctccgtcgtcccttatttcatttttaaaacccatttttttataccgtcacacccgcaaccatggtttccgcctcgaaggctgcccgcatggccaagcgtgccgacgagaagaagcccaagaaggtcaccaaggtcgagctcgatgcccacggaaacccaatcgtcgaggatgcgcctgccactaaggatcagtccgccgttgataagctcacagctcagatggataagcacggtttgtccgatcgtgtcaccaccggtgtgctgtcatctctgcccgcctctcgcgacgttaagatcacctcttgctcccttgtgttccacggaaaggtcctggtcaccgattccaccctcgaattgaccttcggccgtcgctacggtctcctcggtgagaacggttgcggaaagtccactatcctcaagtctattgctgcccgcgagttccccgttcctgagcacatcgatatctaccttctgaacgagggtgcaccccccaccgacttcggtgcccttgactgggttgtccgcgaggccgaacgccagttggaggatatggagaagaaggccgaggaggttcttgaggaatctggccccgataaccctatcctcgaagacctatacgacgtatgtattttcaagttttactctccttggatccagaacagaaactaactctcatatagcgcatggacaagatggatccttccactttccacgttcgtgcctctctcattttgaccggtctcggcttcaacaagtttaccatcaacaagaagaccaaggacatgtccggtggttggcgtatgcgtgtggccctcgccaaggccctgttcgtcaagccctctttgctattgcttgatgaccccactgcccatttggatttggaagcttgcgtgtggttggaagagtacttgaagaagtgggatcgcactttgatccttgtctctcactccatggatttcctgaacggtgtctgcaccaccatgctcgacatgcgtggccagaagctcctctactacggtggtaactacgattcgtaccacaagacccgtagcgagcaggagaccaaccaggccaaggcctacaccaagcagcaggaagaaatccagcacatcaagaagttcattgcttccgctggtacctacgccaacttggtgcgtcaagccaagtctcgccagaagattctcgacaagatggaggccgatggattcatccagcccgtcgtcgccgaccgtgtcttcaccttccgcttcgccgatgttgagaagcttcctcccccagttctctctttcgacgatgtcagcttctcttactccggtaagtgggaggacactctgtacgagcacctcgacctcggtgtggacatggactcccgtaccgccctggtcggccccaacggtgtcggcaagtctaccctgctacgtctcatgaccggcaagctcagccccatcggtggccgtgtctcccgtcacactcacttgaagctcggtgtctacagccagcactcctccgagcagcttgatcttaccaagtcctccctggagttcgtccgtgaccgcttccccgagaaatcccaggactaccagtactggcgccagcagctcggccgttacggtctgagcggtgagggccagactgccctcatgggtaccctatctgagggtcagaagtctcgtattgtcttcgctctcctcgccatcgagtcccccaacatgattctgctggacgagcctaccaacggtcttgatattcccaccattgactcattggccgatgccatcaatgcctacagcggtggtgtcgttgtcgtctcccacgatttccgtctcctcgataagattgctaaggacatcatggtctgtgaggacaagactatccgccgctgggacggctccatcggtgactacaagaaccacctccgtaacaagatgttgtctgccggtgccgtttaagggctttattgattctctttgcttgttcaacttttttcaacttctttttttcccctattgatgacgacgaaatgctagacgagaactgaaggaatacaaatgcccacatcgtggcactaaaagtttggatcccgcaaacagggacactccaacaaaaagttccttggattgggatggttttcatttaatttctttttgtccgttagatcgtttgtccttccccccttttccgaatagattttgggttatggaggattggacttttgcgtttattgctatcatgaactcattacccctgattcgatccgtctgtttctttgtcttatgcgtccttgatagagtgtttagtcctcttttccgaggtgaatataagggatgccagttactatatcgtatggcgctacttgtatatatgatatgcttcctcttgatactttcgatgtttccatgacctgtctagatatcttccccgtcagcagtgtcgtgactgagcatcggccgggactagttcgctaattgacaatgcctttcttttctttcttctctttctagttattcttatcccaagactaatagaatacaccatgacgagccccgagcaacaaagaacatcaacaatgatcatagtacctcattgtcttcttcatcttcttgtttctctctatctaaaacaaagaaccaaacccaagtcaccactaacagaacctgcatatataaatacccgcggatctctccacaatcccatcccatccataatctcattctccacagcgacatccgcagccatatctaggtaagccctaacaaattaacccaccaccagaaacccacccacgcacccatgagcacaatggacggatctcgcgtgcacccgcataatttccgagagatctacacaaaagcctgcgaagccttcgcccacaagctgcaatgccaggtattcgttctcctctgcccatcccccagcccagacatggaagagatcccgacacggctggatgagctcggcgagcgagtcatgcagatcgggttcctgggtgaggtcggtgaggtcggtgtccgggatcataaccgcgtgcgtgttcgttgggggtcgcttcctattaaggagatttgctttcagattaagtgggaattggctgttcttaaggatgagattgctggtggtcagacgccgcctcagttgattgcggagcttttggcggagattttggattcgttgcctttttgatggattttatgtctatttgtttatcgtgcttagtttgtgtactccataggtcttgtaggataggagttcgtgtttgaggtctggtaaaaagaatgacactaatagtataatcacaggactgatggggtttcaatgtcgttgtagttctacggaaggtaatacgcagcgtcaattacaaccactgatatcgcatccattgtatatcaaaaggctgaattgagtttggtttccatgtcggatcggagcaaaatagtcctgagccatattgtagtgtttcggtgcgatgatggcagggatgcacctgtgccctttccgcgtttgagactcgaggttttaggtctgtatagaccgagagatctactggccgcaactcggacctggaatttggaaatgtattatcatgtccgacggttggtgcatatataagtgcgtccgttctgatttttgatattaaacatccgtgtcttttggtgcaatggcatgcatgcctattactacttggttcgctgagtgaccaactccggaccaaaaacatcatcatcctgacggacagcctgcccttgttctaatttccgctttttcgctaggcgttctgtttcgctctcggagttgactattccagtgtcactttgaacagcggaagatggctgggttgattcccgtttagttgcagccaggttcactttctcggggttctggcaatgatatactttctttgcgatgcgcttgaggctcttcatttgcgcggggtcggaggagagaggcgtgtaggattggagtagagcagagcactcagtcaagacgtgatgcagcttgaagcggatttcgtatagagggttcaccaggccattttcgtctgtttcgggggcagggattgtggctgtaactggaccaccgagtttgacatccagcaaaaactctgctaggggacgatctgccagtaaaaaggcagagaaccatatctgggatggtgtgtacaagaagtaggcgtccgtcatctgcgcagcggatttcagcagctcacgagttgtgccgtgggctcgagcgattcgatctgacattgaagatgatgggacgggaggaggtgcgatggacagcaatccttgctggaggtcttctgcggtctcatatggtagatggggggccggttgtccttggccttccgcgatggcttgtagttccatgacgccgccttccagtcctcgaaacggatgccgtacatcaaaggtgaaacgcagtccctgcataagcaagaattccggtgcgatgacgtcctctgtctttgtgtcaccaggaattccatctgcaaattgtcgaagagatatatagtaattatcggttttcgtcgcgacgaagagcgcacacgccatgatcgacttcggatggtatgtcatgggtgaattggttaggtagaagcggcggaggtattggatcgcggtggcctgtatgcgtagaatgaaaaatgtcagcttcccaagcttatttgtacttatgaagagcgtaacgtacccggaccattgttgggattggtggcttatatgtctctcccagctctagcgtcttctcgcagtaataccgcacgagaacgagctcctcctccggtgtcaaacattctacatctttattcttcgtgtccgtgttgctttccggtagtggtgttcccgccgcggaggatgcggtcgactgatgagtctcgcgcgatctgtgcaaagcggcgcgcacgcgctcgctagcaacggcatttgtcgtagctctgagagattgcagagatggctcggtgtatgaccacagacggtactgggacgaggcgcggtagatgtcatcttcaatcattgtgttagtgctctcgtcttgttagaagaatcaaagaaacctttcgaggtttattcttcggcggagataacggccggctggtttgaaatttcgagaagaaatagacgtaagttgaagggccgttttagatatgagaataagtatttgacgatcctcaaggagctcagcaattaatccacttggtttcatccgaggaggttcgaggcttatcgataagaccaaccctcacttcacctgagcagccctagagctctgtctaagggacgtcaaatcattatattgttttctagtcttttacttattttattggtttggatatcaattaaaagctatgtaacatatatttgacatgcataagccacccaatgcaatccgcccaatgcaattcattcatattccatatgtgctttctgcctcatttcatcccgagttcaccccagaaaccagaatatacatcactcaccgagaagtcgggcggcaatatcacccatacgaccttcttccaactcatagtcttgacctccccgtctttcgacaccgacatatcggaaagcagccacaacacgatcaacgtcgaagcccatgctggagaaacggtcgattaaattcttgttgtacccatcatatctatagataatagtcagcaggatacccaatgaatggtagaagaacggctcactttgcgagattatcttcgctagctgcttgccgagtgtcatctaggcttgatccgcttccattgtcagcactacgcacgggagctccagcatagaggactgcccagtcgcgtgcaacacgctcaaattccttgggtgacttgagaagcatattagccacttcagcatcttggggatctttgggctcgggagtgctgagcaaagactgcagtgaaagcagagcggacttgatagtcagaactggtgaccaagcactggaaagtgtgtcgaggcagattgcgccctacattgcctatcagatcccaaattcgctcatatctatattataagggcactgaccgtttgactgctgacatttggatgccacactttggtctcaaacttcatggtaggtggtcgaaaaggatagtccgttgggattttgatatcgatattgtagatgccaccttcatatggggtacctggtggccctggaaacgacccccttaggtgagtgagatcgtccaggttgccaaatggctccgcctttatgtgagagtggacatcggcgtgaatgtccgcaatttcttttccaatgcgacgcatacgattgctagccatggcgattcgactcgtttcaaaaagaggtcaaacaggagatgttgaaataaaccactttgtgtgtaaattgtggagacaaatagacctatttccgtcttgccaaagactgcacaagagcgtggaagctgccgtggagaggaggacagagtggggctaatagtaggatagtgttaggaaggtttcagatcaagtagagagcctcacacatggggtatgaaatcctctagggaattgaaagcaataagataaacgaggatctcaccaaaggaggggaactatacagggaatcagtatgagtgatgagctcaaacactgtcacctgtcgcctgttatatgcaccttagatatacctgagatatatacctcgacagagaacacgagtcttaagtctcggttgtgtgaggtaaacctcagtatagagcctcggaggaatataaatttcttcgattgtcttcgagaatgtcggaggtacaaccttggaagccgataactaagacaggcgttaaggcaacaggtgtggatgacgcagtggcggcctgaggcgtaaatagtcacgtgtgggcctaacagcttccagctcgcccagcgtcctggcctccggcgataccaccacatctgcattgacaaaccatccctttcgactcgtctttcacatcattcaataccaaggctcgggatttacctttctttgattacatttgcaacttcacaccagggattctgatagtctccatctcggtggctgacaaacatggtgagtgttcctttgggaggttatctcgatttatattctaacattcaaaactagggtcaacaacagtctaatctgggcggcggccctggaggccctggaggcgatgacaaggataagaaggtatgtttccaactcatttccactgctacacccagcgctaagaccatatctcttttatcagaaggagaagcccaaatacgaacctcccccaccacctaccactcgtcttggaaagaagaagcgcaaggctgccggcccaagcactgcgtccaagctcccggatatctaccctacatcgcgatgcaagctacgataccttcgcatgcagcgtgttcacgaccacttgctgttagaagaagagtacgttgagaacatggaacgcatgcgcaaggccaaggctctggccacgcaagatcccgctagagggggtagtgacttggatgtgatggatcggaacgctgatgagcggagccgagtcgatgacatgcgaggcagcccgatgggcgtcggcaacttagaagagttgattgatgatgaccatgctattgtctcaagtgccaccggccctgaatactacgtctcgatcatgtctttcgtcgataaagatcttctcgagccgggtgccagtattctcctgcaccacaagtcagtgtctgtcgtcggtgtactgacggaggagtctgacccccttgtctcggtcatgaagttggacaaggcgccgacagagtcatacgctgatattggtggtctggagcagcaaatccaggaagttagagaatccgtggagctgcccttgctacaccccgagctttatgaagagatgggtatcaagcccccgaagggagtgattctttacggtgccccaggtaccggaaagacgctacttgctaaggctgttgccaaccagaccagcgcaaccttcctccgcattgttggcagtgagctgattcagaagtatctgggtgatggcccacgcctggttcgccagatcttctccgttgctgctgaccatgccccatcaatcgttttcattgacgagattgatgctatcggtacgaagcgatacgactcacaatccggcggagagcgagaaatccagcgaaccatgctggagcttttgaaccagctggatggattcgatgatcgtggtgacgtgaaggtcattatggccaccaacaaaatcgaaacactggacccagctttgatccgacctggtcgtattgatcgtaagattctcttcgagaatccagaccgtaagtgataccctagtatctactgctgcgccagcttactaacaattcctagaaaacaccaagaagaagattttcactctgcacacatcaaagatgtctctcagtgatgacgttgatctcgaggaattcatcaaccagaaggatgatctctctggtgctgacatccgcgctatctgtaccgaagctggtttgatggccttgagagagcgccgaatgagggtgcagatggaagatttccgggctgctcgtgagcgtatcatgaagaccaagcaggacggtggtcctgtggagggtctatacttgtaagcgctggaaattatcttgagggtgtgccggagtgcttgcgctggagacctgtactcagctaggtccctcgtgtattgtaataatcgagtaacgaacggtctcaagggtctactgcccagcaatttccctaaatatattcataaacatacatcgaaagtgcataatttgtccgttgtagttagtaatccaggttgtttgcgccaagcttatcagcgagttgcaaacactgcaaacaagctcattatcaggtcgaagcgcctctccccattgtcgcaaagtttctcacacaatcaaccatggatgaattcgacgaggaagcattcaacaagttctttccctcaagctttgggaagcaggcgaaatcggttgatgttgagtcccagatcgaccgctccaagcgtgttgatgttgcggctccgaaaccagaggacaatgaactaagcattgcccctagctcagaagcaagagggagcgacgatgagcaaaaacacagtgatgataatagcgacgaagactctgacgattcagatgatgacgaggatgaatttcccgtatcgcatgagcttgttctcaaggctcatgagcgtgccgtgaccactatgaccgtggacccctcgggggcccgactaatcacaggttctaccgattgcacactgaaactatttgactttgcctcgatgaccccatccacactccgcgccttcaagtccgtcgatccttcagctaagaaagcgacggccgcccaggacacccacgccgtgcactacgccgcgttcaatccgctctctccaagttacgttctagctgtgactgccactgcgcagccacgcattctcagccgtgatggtgagatactcacagagtttgtgaagggagatatgtatctacgagatttgcaccataccaaaggacatgtgtctgaggttacttgtggtgcatggaacccatctgatcctaacatatgcgccactgctggaaccgacagcacaattcgcatctgggatgccaatgttggccgctcgcagaaggaggtgatcgtgcacaagtcgcgggcagctggctccgctggtcggactaagatgactgccatcgcatggggctccccgaaacaaggaggggccgacattctggtaggtgcaggtcttgacggaagcctcgctatgtggagtggaaatggcccatacaccagacccagcgcagaaattcgggatgctcatgtcaaagatacatggacaagcggtcttgatatcagttccgatggaaggcttgttatcaccagaggtggtgatgatactatcaagctttgggataccagaaagttcaagactccagtcacaaccgtcacacatacctcgacatctttccgctacccgacatccaacattcagttctctccttcgtctgccaatatcatcacaggttctgaaaccggccatctgcatatcctcaaccccgctactctcaaggcagagctcgtgactcctgtgacaccgggatcgcctttgattactgttctatggcacgaaaagctcaaccagattatgacaggctctgccaatgccgaaacccacgtcctctataacccgagcatgtccacgaaaggcgcagcgatagtcatgtccaaggcaccgaaacttcgccatgttgatgaaattgctatgcccgcggacttgaatcagggattggcaggtgattcggtggtcgtcggctccaatggagttccgcattacagctcggcgactaggtctgctcgtcatcctacagttggctttacagcctctggtcgctctcgcgatcctcgacgaccgcatttgccgatgcagacaccatttgccaaaaataccccagatgagaagcacatcctcgagcatattccactcagctccatgcgagacgaggatccacgtgaagcactcttgaaatatgccgaccaggcggagaaggagcctatattcaccaaagcatacaaagaaacacaaccaaaggcgatctatgcggaactcagtgatggtgaagatcaaggaccggaaaagaagaaagcaaagcgatgatctgcgatgatctgcttggatatgtactatattcaccacgacttttggtatcggaagcgtcccgttgagtcgcgatggctcaaattaagctacctatgcaatatacaaatatctagtacagcttgtagtttcatatgaatcccaatctaagcacctaactccttacattcgggttgtcccctcttttgctgctctatgacgtcccccaagagcccgacaatccccaaccgcccgcccgaactgccaatgatatttgacctcgccttcgacgttatttcaattcgtatctgcgctgcggaacgctaaatcaccgcgtctcaaatgacatcttccaagttggaagccttggaaacggccccagcctccggagggcccgggggtttgtttagtgctgacatatcaattatctccgcggcgggcctccgctgttagattaccgcctaaccaaacctcttcatactcattactagtacccttgtccgccgtgataatcttcgcgcgagaaagccggattacccggaacagaatgccgtcttttgcgacttgacttgagatcaaatgctcaccgtcgaatcttggggttcgttttgatcggccgtacccaccgaagagctgaggtgtaaggggtgcttaacaaaggcttccccgccaaagcgtgcgataaacagtactcgagtactaggatcgcatcatttcatcagaacggatggcatcttaccagtcgtcgctggtagcaagcctgctacctggtcttctttcttcggctgtctccccgtcaagttcatccacattcgcgacttcttctttccatcaccttttcgttgcgccatcaaattccacatcagaaactcctcatgaccacgatggaaataatgggggaggcatgcatgaatggtcatcgctgattggtattatcacggcgttatgcggcaatgttttgatttcattagctctcaatatccaacgctacgcgcacattcggatcgcaagagaatgggaacaggataagaatcgcaacgggaatttcggaaacaacgggacgcccctcgggtcgagggggaggtcccagaatcaatatcgagactctgagcagaatgatttcgaaccttatcgtgacgatgatggcgacgacaccgagggcacaaacattggtacgatttctcgaaccactagcaccggaagcaaggatggcgcagacggtcgcaaatcctacctcaagtctccgtactggtgggttggaatcgtgctcatggttgtgggggaaatgggtaatttcatggcctacggctttgcaccagcgtcgattgtctcgccattaggagttgtggccttgatatctaattgcattattgcgccatgcttgctaaaggagcaatttcgcaagcgagatctctggggcgtgctcgtctctattgctggtgccgtcgttgtggttctcagtgctaaatcgtccgaagaacaaattggacctcatgaaatttgggtgaacatcaccagatgggagttcctgctctatctagcattgaccacatcgttgattatcggcctcatgtgggcaagtcacaagtatggctcgcgatcgattcttatcgacgttggactcgttgcattatttggtacgtttctatttagttatttttacttttgggattcatttcttgttggtcttgttgctgactttgtaaaaaaggcggatacacggctctttcgacgaagggtgtctcttcgcttctgtctggcacattgtggcatgttatcacattccctattacctatctgcttgtcttcgtccttgtatttagtgctttgatgcaagtccgttacatcaatcgtgccctgcaacgcttcgattccacccaggtgattccgacgcagtttgttctcttcactctcgctgtcatcgtcggaagtgcggtcctttaccgtgattttgagtcgatgacggccgagcgcggaactaaatttgttggtggatgtctgttgactttcctcggggtttacttcatcacgagcggcagagtccgcgctgacgatgagtcgtcattttcatcagacgaggaggggtccattggtttactcaatggtgagaggtatcatgacagaattgagttgtctccacctgcccatcagccgaagacatcacacgtttccacagaagcacaatatgacgttccacagtccccaaggggctccatattgagccaaggcactgctgaagacgatgatcagtctacacctagaggtattctttctgccgcgccctcttcgcctcatggatctttaactggtgcatctcctctgtctgctccatcgtttgacttcacttcaccattgcggcccccctctcgcatgtctaacccatgggcagatatccgccctgttactcctcccgggcatgaagacgaggcaatgcaatcctcaacagttcttctgcgtttccctcctgcacctggccccgaagaagcaacaggagccaatggaaatgtcggtgccgtacgacgtgcttcaacacccccgcttttaaatcaggccaaccaatctatccacaatgaggctccccctgaaacaacatcgcggcgcgctttgcgcaactctatctctcatcgtttctctcctggacctctgcttcccgcactttccggtggcttcagcgcggtggtcgctgattctatccgtcgtggtgacggtagtcctctcaaggatcggccaaggcggagattaggacgtcggcgccaactcgatggcgcttttgcagatacatcccttgagggtcatggggatgcggcgctttcacttgcaactgctcgactccagtccgccaccctagcggacagacctgcggagactggagatctcgcgacggaaataaataacataccagcacaacacatcaaggaggatgtgacccatcttcgcagcctgagtgactcgtggaatggggggcttgcgtggctgggtggtgctctccgcaaaccccagaaaacccaaagagccgacagtgttgctgtcactggaactccaacaccagagaatgagacacaatccgaaccacactacaacatcggcgaccatgacgccgaggcttcctagctctgaggcataagaacagttcattagagtggccatctcactcgaactctgtatacatttgctcttttccctcgatatctctccccttggcgcttttcccgataggtttctatcggcatattcttgtaattaacattgcatactgcgggtatatgtttaagaatttatgtatttcttccttttcacgctgtatatttcatccgtgaaggaggcctcggccaccagttttacctttagcctctttatccgttcaatttatccatattgatcacctgccacacatcttgttccggaagtatctatcggagaaaacgggcatcccaataggtaaaaaggttgacagcacgtaccactgcccagaaggcgcagccagctaccccagacctccacttctcgagtcaatttagccggacagccgacagtccttcccctcaaccccggaatgccatgccaatgtggagtaggggattgctccgtctcctgatagtactagctcggatcaaacgactctaagcaaggcactactgcagctgttcagactagcttgatcgtttctagggttgaagacggcttcatttccgatgcacaatggtacgagctacctgcctttttctatctacttcaattcgtgggatcattaaatcatgtcatacaattcgattaacctctctccgcagttcaagggtgtcgattgcgggtctgcatggacttatatgcaagagcttccccaggaatttatttttcttccttccaatcccatgctagtcaatctacaacagttgacgattgaatttggaaaataaggggttgtcttctcgaaatggtggccaatctgctttccaatgggctgctgctcgtgcagatctttgctgccctagctgtgggaagacagagcctcagccctctctacaaggattccaatgctccagtggaaaagagagtacaggacctgttgagccggatgaccatcgaggataagcggtcccagttgattcagggtatggtttcatctcaatcgctgccatagggaagttataattgctgatgcatttttgtacaggtgatattacgaattggatgaaccagacctcgggagaattcaactacaccggcctggttgccaacatggagctgaaggcaggcatgttctatggtatgaactcctctactcagctatttgatcccttttttatcggcccgcagaaaccaacagtaatgccttacagtcggataccctgttgcttgggattggatctcagacaatatcaagagggcccaggactacctcatccacaacactactctgggaatccccgcaattgttcagactgagggtatgtactccaaggatacattctccagctgcaatgaattcaagctcatacatttcttgcattaggtatccacggattcttgattggtaatgccactattttcaattcgcccattgcatatggatgctcgtggaatacagatgtaagcgggtactatacttgcactgtcatacatactgtcatcgagatctaacacggtgttgtgtagcttgtcgagagaatggcagaaatcattgcacaagaagccaaagcacttggtgttaatcagctctttgcccctgttgttgatctcgctcgtgaacttcgatatggtcgggtgggattcatctacatgttgatacatccatgacgactaagctaacaaagagaaaaggtagaggaaacctttaccgaagaccctttcctcgccggcgaatatggttatagctacgtcaagggagtgcagggcaagaatgtgtcagccatggtcaagcactttgcaggcttcagtgcccccgagcagggactcaatactggcccagttcacggtggtgaaagagagttgcgcacaacgtatgtcgacccccaagctcagagaataaacagttgactaagtattgcataggtggttgccttctttcaagcgagctattgtcgatgccggtgcttggtccatcatggctgcgtaccactcgtaagtctaacctgatctgatgatataccgccatgctaacatatgtttccagatgggacggaattccagcggtctctgactaccacactctcaccgagatcctaagggaagaatggggatatgaatatttcgtcatgagcgacgctggtggaagtgacagagtgtgctcctacttcaagctttgtgagagcgatcccattgacatggcagcggttaccacacagctgctgagtgctggaaccgacattgagatgggaggcggttcattgtgagagctttaatgaaacaagcacgacccagaaacatacactaactaccgactagcaacttccaaaagattcccgagcttgtcaagtctggcaagctcgatattgacgttgtggatactgctgtggccaggttgctccgggtcaagttcgaaatgggtctcttcgagcacccataccctgctgcgcctaggaacgagtggcgttcgctcattaacagccccgaggctgtgcaagtcgcaagagacctggacaaggaatctatcgttctgcttgagaaccacgaagacattctgcctctgaagaagtcgagtaacattgcggttattgggcctatggccggtggtctcatgaacgtaagtcacattcttattccacttttagcctagatattaatgacgtttatagtacggtgactacgttgtctacaggagccaataccggggtgtcactcccctcgaagggatcaaggctgcagttgacgacaacgcccaggtccactatgtgcagggatgcgatcgagcgagcaatgatcaatcaggctttgaagaggcaattgaggccgcaaaaaagtccgacgtggccgtcgtgattgttggaacctggtctcgcgatcagggggaactctggacaggactgaacgcaacgtgagtaaacccaccttgtttcaatatatatctgaaagtgtcagtactgacagacaaaaagaactggcgagcacgttgacgaagacgatctgtcccttgttggcgcccaaggacctctgattaaagccattgccgacaccggcgtgccaacaatcgtcgtcctgtcaagcggcaagcccattacagacacatggatcgcaaactcaaccgctgccctcgtgcaacatttctatccatccgagcaggggggtaacgccctcgccgacgtcctttttggcgactacaacccatccggcaagctatctgttagctttccccgctacgtgggcgatctcccgatattctacgactacctcaactctgggcgctccatgggcgacgtaggccataagtatgaaaatggaactctcgtgttcggccactcatacgttctcggtgacgcttcaccgtggtaccccttcggctatggcaagagttactccgccttcaagtacggagctgtcaaggtcgacaagagcaagatctctacgtctgagaagactgtcactgtgagcgttgatgtgactaatacccatgctacccgtgagggtacggaggttgtgcaggcctatatccaggatgatattgcctcggttgttgttcctaatcgtcagcttaagggcttcaagaaggtggttatccctgctggaaagactaagactgttgagattcctattaaggttgatgatatcggcctttggaatactcggatgaagtatgttgttgagcccggtcagttcactgtccttgtgggtagcagctccgaggatattcgtggtaatgctacgtttattgttcgtgatcgttgagcttgatatcgaagggaggcatagttcttaggacgtagtccgatgtgtgtgttgtttggtgcatcttagattgtatatatcttgcgtgatgtgtgaagatgagagattcgaattttcagaaacccagtcgctttccctacatcattttctcctcgtatcctaagctgattttacttctcgacgactagatacactagaatttactatgcactgtgatacatatctaacattatttatctcgcctggatgattctaccgggctggtatgagatgataatcagtatttgccgtactaccgatcgagatacgtgataatcaattggattcgaagcttcataaatggtgtaatggggatatctcataaaggcatagcataaaggaccaaacgccgtttctaaccaccgataattgatgttgcgagactatgctgggtcacctgcagcacgagaccctgcttgaccagtggagggacctcgaccaggatctggggagaccaaaggttccgatggcttgctggcaccactcgcaggtggattgctttgagtgtcaccggagcgaccctctgctctccgagttttagcaccctctttcaatttctcccagcggtctcggtatcgcccaagaacattcttgagtttgtcgttttcgtgagcaacactttcaagtttattctcactacgtcggatctgctcctcgagttctttgatccgcgcgtcagtatcagccgcacccggcggcgcagtcagcatagcaacaggagatgcagtggccgtagaaggctgcaaataatcaggcgtcccggcgctctggcggtgcatcattcggattgattgctgcagcgccattgacgaagattgtgcgctcacctcccacatatgcaaccgtgtcgcaagcgaatcggtcaaacctctcaacgtctcattctccacctgcatctcctccattgtcttgtgtgtctgcggagtggtaagcttatcgggtgcgccgcggcgtcccgcccatgtgcgtgaaccactggcactatgacgcatttcaggagacgagggggtctctcgcgcatccacaaagtcgtcatcgccatcctcaagactgttcctgcgtgcctgcttttcagctcgggtgaggattcctgcgtaggaaatagttccacccgtggttgggactacatagaatgactctgctgggttgccgggacctgccccagagccgtcccgaatcgaccgcaatgcggctcgagagaagagcttgttcacgtcaggctcgcccgcagtcatggaccggtctagaacagcatgctcacggtctagtttcacctcagctgaggccttgcgactctgttcagcgcgagctggatcagaccctatttgaatacccgcgaatgccaaaggtccggacaccttggagaccagtcccccgaaggctgagtagaagtggttgaatgcttcatcggcaattgcaggcttatctttcgatccttcagcttcagctgcactaggtacggtttgctgggaatccacctcagtgggactgggtgtcggaggagaccatggttgtctgggtgtagaaaaacgactgtgccgattcttggctggtctgtcacgtagccttgtatcgccggctctagccctcggtggtgtttcggtcatctttgccgcggcatgttgcgatgtaagtgttggcgataccggcgatccacgccggggctgtgatgggattccccgggcggatgctaggttactagcaatagatggtgtatcccgacttggcagacgagtgttgcctaccaatcttggtggtaggtgtgcatcctggttcgcgcttgcactctttgtgccgccagtctcggcggtcggttggatcgctaatgccgaggagccagtagcaggtactgtttccgcagggatcgtggttgggtgttcatgttggaatcggaggatttcggcgagcttcttgtggtgagtttcgagtaaacgtagggtccgtagggcctatgacgcgttagcccagaaccgagcgggggtagatcttcaactcaatcaagactcacctcatggtcggagctgctctgtgcagccgttgcgaattcaccagcagctagatcatgctcctcgctggcagcgactgggttggccttgcgagtctctagcactgcgttccgggcatgagtgtgggcctgagtgcggtcagattatgctgaaaatgaggggatgaggtcttaccaaggccaaaggagctacttccatggtgaatatgatttcactaggagtcaagagataaaaaccaggtgcattcttctgatgggatttttccggggaatgttggagaagtgacgttatgcgcagtgaatgggagtttgatttgacagtgacactacggagtaggtaacaccatgtacgccatatacagatacatgaggtggacgagaggacattcaaaacaaaacaatacttctagatcaacctaaaataaatattctacatttcagactgaaagcagccaaatgtcaagtcacatccacattccagtggagacgcggagagtagacgctgatagctacacggcggtcaagctactcgacggccatcgactcagggggaatgccaggaagaccaagaatagcaggaataatagagaatagagtcatatcatcacgaatgacatacataaaaccaattgaataggagaaaaagcaagtttcagtctcataaggctagtcagttatctacttggcgggtgactaagttgcggagctccaggggatgagcggacgattcagcacttctctctctctctttacttcgatcccgtttatatatggaagttctcgcacatgaaaagaagagaggcagaaagtgttactacatacgcctcatgacaactttcccttgaatctcctggtctccccgcatcaacccccccgattctcattccctctgcattcctccaattatggccgactcttcgtcttcaagctttaaaggcgagaacagatcgcgccgctcctggacattatcggcagaatcaagtgcaatcggtagcaacggtcggtcatcccaggagtcgaccctcgagagaccgaaaacccagggtggagaagcagcagatcctaaggctggtcctagtggattctcaaagctactcgatgcgcgtcggaggcggaaagagcataaaaaaaagcagcagaaacaagccgacgagccgccggtgccgactgttgttttggaacaagacctgcatgaaagccggtccaatgaatctcgcgatgggacctccgcagccccgtcgtcgagcacagacagctgggtgccggagaatgagggcaataatctattgacagatgattccgagccggacgggtaagttgaacaaatggccttctcattgtcttggactactcctaaccagctgatctttttggcttcgtttaggcccccgccgctcacctcacatgactcccataccggattctacacgtcgtcctccccaatgatcaagaccaaatcggtggataccgcaaatacggaaggatggcatggtgatgccgagtcagctgttagcggctctagtgccaccgggtcagaatcaaacccgggtgatagaatctcccgacgcgcaacatcgggtatggcattggatgtccctacggactcaaatggcaagaaacgcagtccatcccctgggcgacgcctgagaggcgcgtccaattcagacaaaaagggtgccagtgacgacgctgaggcttcatcaattaagtctgggagcaacaaaagccgaagtctgttcggaggcagcaggcggggcagtctttcatcaaaacgagcacaggcagcccctgacgacgttccgcctttgcctgcgccaattcgtactgatctaacggaggagaagcctcgtgcgcttgaagcgagccccatgccgaacaccccacctcataccgctattcctgcaccagagacgactgtaacccctccaacaccaactgagcatcgccctctcagtgcacaaatcctatctaacaatgttaccgattcgcccgagcccctacaagaaaattctcccggtgttactatcgtgagcccctctggaaacatgatctctcaccgccgggtgcggtccgcttctgcagctcatggcccaagcaaattgtccaattcagtgtctgcactgacacctcttgaagaaaaaaccccgggggcgaagaatgcaacttcaaaccagcaaagtggcttcttctcctccgtgttttcagttgcgcaaaacgccgccacttccttaagcaacagcatcaacgcacaacagagaaatcgtccaacatttcaacctgttcctgctgatgctgataaatcactcaatgaatccacctcggaggagggcgaaaggacatcggataacggcaagactgaagggagaccatctgctgtagagactcttggggcaggagatctgaacttcagccatctggacattgacgcacgacccggtgagtcaatcacgactgccgacggcgtggtgattacaaagccagtgaaccccgctgacaaccgcaaaaacacagctgtttcccggcgagatgaggaagcggctaaacttgaagacaaacgcgcagcgcgcgctgttcaagtagcatacgaaagaccctcggagctttcattgacgggccctgcggaagacgccctggagattgagtctaacacctcacttccgaaagatagcttaattctgggtgatcaaactcctcccagtggtagtattattgacggtgacctaagcgggggccttgggcgctcaggcagtgtgcgcagtaggcttgcccggcgtcatcggggctcatctggggccacagcctcgacgattggagcgattggcgccaaccccgctgcccttggtgttcctggcatcaactccagtgtgcctcggttgactggcttcgctgttgcgagtaagaagcgcaatcgggactttcaccaattattccggagcgtacctgaagacgattatcttatcgaagattacagctgtgcgttgcaacgtgagatcattcttgccggccgcatttatatttcagaagggcacatctgtttctctagtaacatcctgggatgggtcacgactctagtgatcagcttcgatgaggttgttgctatcgaaaaggaaaacacggccatggtgttccccaatgctattgccattcagacacttcatgcgcgtcacacgttccgcagtttgctcagtcgcgagtccacctatgacctaatggttaatatttggaagatcaaccatcccaccattaagagctctgtgaacggaacccgcgtaacccatggcaccggtgataagacagagaaggtcggggaggacgagagcgagtccgagagcgaggccaccgatgaagatgaaatatacgacgaggacgaggaaggagagaatgccgagagcttctacgagggtggcgacagcgccaacaacagtgcaacatcattgccattgcaaaaaggattaagtcgtaaggcttcgaatctatccacacatgctgccgtgccagtggccggcacaaatggcaatggcgataaaaagaacggagacaagggaacttccaaggacgcgactcctgatttcccaggtccgactacacatgcgcctaccgagtacgtcgaagccaacggacagtacgaaaaagtcatcaaagatgaaataattcctgcgccgctcggcaaagtcttctctttggtttttggcccagcgtcgggcgaatttatgaccaagttccttgccgacaatcagaaatgtggagagctacagttcgagggaacaccgaagggtttgacgatggaaagcccaaccaggaagtactcatacatcaaacctctcaatggctctatcggtccgaggcagaccaaatgtatcagcaccgagaccatagacttattggaccttgaaaaggccgttcttgtcaccctgagcacccaaacacccgatgtgcctagtgggaacgtatttgctaccatgaccaagtacctcttcacatgggctcctggcaaccaaactcgcttcctcatgacttgtactattgagtggtcaggcaagagttggcttaagggtcctattgagaaaggtgcaattgatgggcaaacgacctttggtaatgagctggtcaaagccttgcaggttggtgttgttccccgtgggcgtggcgctggacgaggcaaaggaaagcgcaagaagggcgatgccgcagggcgggagtcgaccgcagctgcttcgttgaaggttactgtggattccaacaccggaaatggggaatcatggggactattcgaaccagtccgcccactcctagagccctttaccagccttctcagtccgctatggactagcaacgtcgctcttctagttatcgcaatcttgttctacatggcgttcttccgatcctcgccgtcgtcgtccatgctttcgtctgatgtcggctttcccggtcacagcttgcctcagagactggccgcatacgaggagatgtggcgacgcgaagagactgagctctggaattggctggaagaccgggttggcatggacggaatggtatttccaaacgtctaccggtcgcccgagccacacccaagtcgtaggtcatctggagctagtatactcgatgagcgcgagctcgctgcacggcttcgcgaagagaagatcactgaccgtgagatggaccatgccattcgcactacccgccaacatctcgacgtccttgagaagatggtggacaaacgcaaagcccaatgggaagccgatgaaccagtgaagtccgaattgtgatggacatcgatggttgttcctccttgcacataagcccaaccaggctcccccctatcctctctcctttataaacttgtctcttgccagaaaagtcccacaattttccttttccaacaccacacaaaatctatttccttgtctttacaacttgttttattctcatacatttatcggggtgttatcctggagtcgtggtaacaagcagagcttgtccatgctgatattcaccctcctcacattcattttgaacagtccaccgtcattatccgactctccctccccatatccttcgatacaggggcaggttttccttgcatgtacatgagcgccaactatcttgtctttaccggtccacgagctaccggcttctattttcttgttcttattgcttatttttcatctgagcgtactagctacttcttttttttttgtgtttcataggtggcactgtatccctaaaagtttcccatgcagcgtgtttttgctgtttggatatcttttggagtgctaccgtgtgctctcttttctttgcccattgggcttctctgtgaataccttgagctatcgctatgttatttacatattcaatttaggctatgcctgacagccttgtgtgcgttcgtactactagaaagtaaattacttgcttaagcttgagataagctcgaccatatgtccatatcacttaacaagagaggaatatcccgaatgactgcaatagcctggtttataaatatcaatcaaggtatctcgctaagaaatcttcgtttcaatccattttcttgagcacttggtttttttcatacttccctgttgactatgtcacccctttccccttccaatgtttccccttcacttctcactatttcattcttgcacctgagatattagtttccaattgatttacacgcgactctttgagcaactcccgagatgaaatcgatcagacacatcacgacgcgttcgttgactccattccgcggacaactcttcccgatgcctcctcgggaagctcttctaccccaaaacgaattggcctggctcccagaagagaggaagacggcacatgaactgatagagcacccattcctctagagaccgaagaagcctagcaattgatggagtttaggcagagaaatagtacttgatgggctcagatctacgtgcatgatactgactgatatatctcgggaatatattacgatagaggacagttggagaaacagcgcagtcttggatacatgatcaccgaaggaatctaaaatacttaatagatgtatcggaagctgttggaaatcgttagtattgttcttacaagagttggaatcgcatcaagagacatacttcaggttttctcggtccgtcaaatccagaaatgcagtcgcatccagatctctccccgcaagaccaccctccatttgggactggatgcgatcgcgcttttgattttcccagcgcagcaggagaccaaggatactgatcaaaacggcctcgatcaagtgcgagacaatcatggaccaaatgccgagcgtgtaggtaggtctgtagttcgagttagctccgtggttctaggaataatagaactatcctcgagggaagaacacacgattgatccgttttgtagaagaatggcccggcaatgtttccagtgcagtatcctaggaacagaacagcgttggtgacgactttcttagtatggcctaaattcataatagtattagattttgtgatgttttaatcaaactccgaaaacagatgtcacttaccagccgtgttggccatctgcatactcaaaacaagtacaaacgcagcattgtacggccctgtcaggtaatagcaaatcaagcggcccacactgtgttcgacaggaacaaagcgaagaccaaaggagccggcaaggttaggaatcaggaagatgaggacgaaaacgcatcgtcgattctgaaagcgatcgttgaggtagacgcatgtcaaaatcgagatagcaatgataaaaccgtatggaatctgtttgaaccaggttagctgaagattattttgttatcaaataaaccctacctgcataagggtggtcaccaatgttgagaacccaagccctttaataattatggtgccgaagttcgatataccaccgttaggaacattgcctatgttgatgttagtcgatgcaacgtatctggacatggcacaagtcacatacaaaccacgccaagaatgaagaacatatagagtttgtagtccaggaaagcctccaaaacctgatacggcttgagatgtttattttcgacaccagtctgattttctcgtaaacgctcaacagccatgcggcgttctctcttggtaagaccttttgctgtaacgggtgaatctgggaggaagatgaacatgacaataccccaggtagaacatagtgcaccactaagcaaggtcagcaaaaggacagtttgaatgagcgagagaattagcatacattacgagaaactcgtatttccaagacggcagtgcacctttaagatgaccaattccatagcctagtagcccacccaatgcaataccgaggccgttcgctgtgtaccacagtccaagacgcactggctgttcacgacgggtataccacatgctcgtgatcaacatgaaagccgggtcggagcaggcctcggcggcaccgccaagggctcggagaacagcgagggtctcgaagctgttacatgcagcttgaagcatgaggaagacaccccttgaagaggaatgttagtgtctagttgtattcgagatcagtttaacgaaccacatgaaaatattggcacccagatatttccctaaacacgtatcagatggctatccagtcaaattgccagggagaatcataccgattggaagacgctgcatcagaaaattggtcgggaatgcccatgccaggaaaccaaaatagaagatactgctcagccagctataccgagttccatgtagatcgagatcttcccgaattccaaaaatagcagcatagctcaacgttgtctatttccaaaacgcgtgctattagcacagtttttcggccaaaagggagaaaataggtaaatggtcttgaatcaaagagactgaccttatcaatgtagaagaacgcatagcaaacagccaagtagggcaggatcataaagtcaatcttccacaatagcttcctcgcctccacaggatcgacttcttcgtggagctcgtccgggtcatcgaacagcgccatagccgtgtcgccgtcagcattcttggcagccttaaaattggagtgatcttggttgctttcttcgtgcgtgatagtgggaacttcggcgatattggccttcgagtcaacatcttgggatggaacagggggatcatggttcgccataatggtgttacgttcgtatgatagaaagtgcgtataatataaaatagagagcagaaatcaatgagcctgggctagatggaaatatatataaaatgcaggaccagccgggggttgggacgacacgaaatgtataaagcgataacaataacctcggaatgaccccgagtctcgccccttgattcaagtcaaagctgggacgtcttcgaaaagcagccatttcgtacttccccgcgaattccagaccctaccttgccccaagcggcatagctctcaaggatcatctgcggggaagacccagtacggggcccccacgccgtcgtgtcgcgagctgatctgtcccaaacgtggggaaggtgggtcttggctgacgagtagagcagagtcaaatcgaaagcactgttcagtccatcttaacaagtctggctgaaggccaaagcttgcctggcacaaaggctgctaatgtggtcggcgaaagtccgaggactcggagatgatgccgctggactgatcatttctgaagttgtttacaccgactcatcgctgagcgataatgcaagctcctatggatggcgtccgagcttccatgacagccgaagatgacagttgtgaaagcgagtctcaacggctgaagctgtaaggagtatcatggttcaccgccgcaatgaagatgcttcacttatccatatcgagatgaatttgtaagcaaatagcaatgccccttgctagttagctgggtatgagaccgtatgacatatgattaagagttgagaatttccttctttatacgaagattccgattccggtgtctcaaattagatttcttcccacggaatccgactaagaagttatcgatagtaaaaagaagaaagatttgaattaaattatgagccacaaatcgcacttttgatgggaatgatcttctacgcaaagatactagacggttagtcaactttttgacggggattaccatggccatatgtggctgcagtgtctatcgccggttgaagttcaagaagcgagactgtatcagaaaaaacaatcagtatcacaattacaaatgtagaaccaagatatagaatatatccacttaccgccacgaacaagatgatcaggttggacccaataaacgccgcgaagatgcccagatcccgccatcggttgtcaaaggacatattaaaagccgcatagaactgctctccaaccttgtacgcacagtacttgcaagcctgcgccgcgtcgtcgacgatgtatccgttgccaccgcggtcgaagaatggcttcatgtactcgccacaagtgaggttgtcaggggcattgaacagattcagctccgactctgtgcaaactacatcccgtccctgtagctctgtcacgaccattccgccgatcagacgagtgaatggatctagatcgtacagccatgcacgccagaagcctggcatctgcggcttggggattgcaacaccacagaatagagagaagataatcactaccggtgggttgatctgagacgcaatgaagctgttgggggtcagggctgagatcatctgacccaaagtcacagagaacatctcggtgatgaggattatgaagaactggtagccggaccggctggactcggtctggaaccctgggatgtagtacaaggggaggaaaaagcagacggcgcacaagacgctgtatgggatttcggcgaccaccattgacagtgaaaaggcaaattggctgtaggtttttgatgctgactcgcggtagaagatcagacgcgccatatcgtaccggggttgaaccatttggagaataattgctggtagcaccgtaacgttgaatataacgaaaatgcggtattgcagcgaggaacgagagtcatcgagattcaagaatacaagacccgtgatgatagaaatcacaacatgggtgtaaagcctggtgaagccatagttcttcgagcgccagaatgatagatgtgttcgccgaccgacgactttgatctggtgccagagaggtgaagcgtattctctatcgaccttcttctcgtcctgattatcccgcacggcctgcgcacgctcttgcttgatctgaatgatttcctctttgacttgatccagttcaggagaagtgcgccaaatgtcgccccagtcacggtctccgatccgacgtgtttggccagcgccgatggcatcaagcatccactcggccgggttagcatccgtggggcaatcggcaccattgcgacggaagtaatccagcagaatctgggagtcatggccgatatcaccgtggtagatgcattcacctcctctttggagtaggagcagacgatcaaagctttcgaatagggcggaattgggctggtggatggtgcagagaatagcctgtcctgctgctgctagcttccgaaggaaacgaacaatgttccaggcagattggccatccagaccagaggtaggctcgtccaaaaataaaagcagttcaggcttcgctgccagttcgacgccaattgtgactcgctttctttcttcgactgagagaccagtttcaggtgttccgatgattgcatctgccaggttctctagctccaagagagtgaggatttcttctacgtaagcgtacttttccgattggggggtctcgaatggctggcgcagatccgccgagaaacgtagtgcttctcgtaccgtctgcatgtcttcgtgaatgtcaagttgctctgcgtaagatgtacctctttggaacgaggtgcctggaggtttgccatcgacgaaaatatcaccagttaccacaccgatgttctttcttgcagccaaaacatccaacagcgttgtctttcctgcaccggatgctcccatgagtgccgtcaactttccaggctggacatagccgtagacagagttcagaagacgtcgggtacctgagggcacaggaacttcgtaagagaggtcttcccaggtgaacacggacttggaggtaatattgaggtttgatcctgcatcagactgaagagtctttgcttgtctgcttgctttcctctgcatcaaagcctcatttagctctttgcgctcggcgttctctttctggtagaaagtgatggtcttgccgcctgcaccgaattgcagtgtttctccaaaatataagtttgaaatgaggaaaccaacaataagagcaatcatgatgccaaagtttcgccaaagatcaccattcagataactgaagctttgcgcgatgtagttggagcccgagatgattgctgacccagggtcgcctcccactagagtacaggcctggtgtgcaatgtcggtataaccagctccagctggcacgagtgagtctttggtacatgtcagagtaaggtgcctaaattcgttgaccatcaatgcagcgaatccgagaccaaaggggttgatgaagtaaatccatcgcagccacacctgagcgccagaccactgaataagatatccggacgtcaaaacgaagaatgtaataatgacggatgcaaacttgatggcataatcgaagtcaggacatagacatcccacggttcggaagaagactgtcatagtcacatagccctcaaggataatcaaaacaaatataaagaacgccccagcatcaagaaccagtccgcacatgaagtaaacgatgatactgaatacgaggatcctcgcgatggcaaatgcagtgtcaacgataatctgtgcaataaaaagtgcgcttggtcggtagaatgtgaatgaacggtgcttgttgacaattgagcggcccatcattgtggctgcaagttccgagaacgcctggaagccattgaacagcagactgatgaatagaagacctcctcgagtaaaagcaccggcactggtcttgggttgattgagccatacagtacccaatatgatggcaatgccaacagaggtaacccaggagacggtcaatgcaaacttgtcttgccatttaaggaggaactgccgttgcatcaaagcccaggtttgtaggtggaaaggaatcgagtatacagatgattcagaggtaaacttgcgctttgcctctttattagcaatctcgaaatcatcgtagattttcttttccttctgaatctgggcgcggtaggattccatttcttggtctagtctttcactgaagacggatttgtcaaaggcttcgaccagcgcttgtggtgtagatggcacatcgtcggcacttcttccatctttgaactccctctcgaaaggatcggtgcatcctgtcaagtagtcgggcgtggtttgacgaggcttttcgcggaagccgaggccttcgaaatatgatcgtgcttcggatgcaggaccgaagaatacttgacggccattgtcaatcaccaggaccttgtcaaactgtttatagatgttctcggacgcttggtagagtgacacgaaggttgttgctttgtatatgttggtcaaaattcgtagggacttggcgaaatcgagggcagtcgaggcatccagaccacgggtgctgttatcccaagccaatacagtcgcagaggtgatcatcatttctgcaatcgacacgcgacgccgctcacctattctaattagcgtcaattgcgatgaggctgcacacctaaaatggattgcttacctccagatacaccacggataaactggttgccaatcacggtgttggcagtgtgctcaatattgaacattttcagaagcagattggtcactttctctttgaactcagctttcgacacaccaaatgggcgctttccaggggtcttcgtgtcgagggcgaatccaagggtttgtttcacagtcaaggtgggttgatgaacatcatcctcttgattgtatacggcttctccgcggaatcttttggagaacgaatccgcgtcgaaaggaccatagagcacctccccatctaccccggtgtatccaaaccgctggttcgcgatcactttgaggaaagtcgtacagcctgatccgggacgcccaaggaccaagaccatctcaccaggccgtgtgagaccccggaaaccttccaatatgttgtactcctggcctttctttctccaaccgaagaggtcaattagtgttccgggtacattgagaaaatcgatgattgcatctgggaatgttttgatgtatgtcttgacgccgcccattccacgaactgacaggttattccagattacacctaggaagacagtcagtacttgtttatcctccctatgttgagtgtcttcggaccgatatgcttgtctttgatgccagcctcctcggaagcgacacgatcgccacggagagtggtctccaggtcccatgaatcatccgacgtagttgaaccctcatctttctcgatatcttcagtggtgactcccgtcttggatgctcgggattcttgtctagataatctgtgggctcggtgcgatatgctggagaattgtctgctcaaatcagaaaagtccttctcggcggtcataacatcgacacccgtctggatcgggatatcggccggggtgttggcgatgcgaatttcttccagctggcgtccatagctgtttgaatccaggatacctcattattcgccccccaaagcccaaacaaatgtgggggcaagcctccacggacggcatattccgcggtggagtgaccagatttgaagatgccaagcagacgggctcctaaacggggaaaagcgtgcaatcccagtcgatatgactcgtgatgagtcgtgatcactctgcagatgattacaaattcaatcatatcgtgcaggaaatctcgttctagagcaaacagcgaagagcacggatcgtttatcgacctactgttgtggagaagtaccaattagtgccctccactttacggggtataggcaaagacaacgtacaaagtacggagtacatatcattgaacatggatagaccctgcatagtacatctatgttccatatcgtgttgcgtatgatccgttcatagcggatacaaactcgcatatctccctatattgtactccgtatacatgcttatgcttggcaggaccatcaaagtttagacttccatttacttggacttaataactaaagcctcgaatactccgtagttgctagttagttatcttgcctctttgcaaaacaagaagacagtcgcaaatttattcctacgcgtcgcgccagcacccatctagttagctccgggatatctccgggtgaccgttagtttctcctgtctactccatagaaggccaacatttcaagaatctgacacgtttaaccttagataacccactttgctcatttataggcgaaacacaatccatgtctttattgggtagcatccacgtgcaggagatgcgccgccttgcatattcggagtttcgcgaccaatcaatgttcttgatgtttccgcaaaattacccgcagacatctcataaactggatttccaacggttcgagattttcctaatttgttgccgcttgaagtcctgttcactaagcgcatagcctaaaactaaaagaaaggccgaaagcaatcacgtgataggtggatactgattactaattatcaatctatttctcccgtgatccatggatccgtggagactagcgctagtgactaaaactttatttgttttgaacctatgtcgtaccctgtacagagtacaacagagtacaccttctcatacttgctcaagcgtagatcatggtatggcaacgggcgacaactccggcgccgatcaataaattcgccatccaaaactgcgggtccccgagatcgaccttaactccggccatccaccatgttcttggcaatctgcatcgccaccagagaccatatgtacagtacatactcatgcgcatcgcattgcgtgattgatttgagagatagaaaacaattcccttgaagccttgtccatggccctgggaattatcagcgtcatctgcagcagtctgcttatgaaaacttggccgcctgatatcagtatgaaaatgtagatgtttgaatgtgcgtgtgtatgaagaggttcaatcttccagttagactctaggtataccctatgaagatcgatcttgtaggtagagcattaaagaggaaagaggatccactcttgatgatcgaagcgaccttctacacagagtgattctcgcgaagtagatcattcaatggcctttacatacaatgttgtacaccataatctgctgaacaaaatccgcgccctattggtattgattccatcatagtagtaaaggggagggaaaaaatagcattcttcatcccgatcccgagaccatcgcccatcaatggcagctgtgatgccccttgccatcgacctttgcccactgattcatttgctcccaagccgacaaaccgacacagatcgcaatccgccataccattctacgactgagtccctcgcgccacacaccccagataagggtcagaatagaaaccgccagaaaagcatttcgcagtttctcgacgccagcagtggccaccgaacccgcaaagagaaaatcgaggacagcctagaaacttagtatatgcattcaataccatagtgacatgggaaatgacatactggtagccaacaacacgaagatgaaagcaatgcggagccttccggtagatatttaacgattaactgaaaaggtcttcgcagaagggagccgtcatggtctgggctagacttgcacgtggaattttcggagggtttttctgtggagcaatcgctgcatgacattttgaatatatatagaaaaaatggtctgggagaaaatgaaaccaggttatgaagctagactgtgatttgtatatatattgtcgcgggattttcgcgtcgtcggagaatgccccacagcccctggctttaccatactgcaaacaagtcaaaatacacctaattgggatgagcgctcggttggtaattcgtatttcttggcggttatacagattataaacgtgaggagtcagcccatactatatgtacaacagtgagtgtggttcccaagctttgtcctagaattctggtcttttgctctagcgcagcggaaggtggcacgtgacaataaagtcatctttcttctttatctgggtcctccgggagtaggtgctttctaagcgaatccaaagggcttgttaagtgcttcgctaaccacgtattagaatgccctactaaccggggcacctgccattacctgaagtatttcgacgtttctaggctcaagaagcataaggagcgggttgatcggcttgagaagtaggaagggagtttaactactagttttgacgtaaatacaattccccgggtattagttgacacggtgagcgggcccttattgaaccgtcattttgccagctggccgcttttaccgccttctttaccttactacacctccttagcaagaccatcgacccttcacacttgacgtttcaccatgacgacctcaaaaacacccgactcgtttcaagcgcacaaggccaggaagcgccttgatcaattttccaccgacttggaaacggccataaaccatgcgacaaaattcaaaccttatcgaaagacagctgtaatcgcctttcactgggagaatgatgatataggggtcgagcctctcgagagagaactcctagacgtcttcaaatctgtttatggatttgagaccgagagtttcacgattccgcttatcgagtcccagttcaaacttctagaatgtcttgtttcctggtcacgacgaagttctggagaagatacgctccggatttttgtttactcagggcatgcggggtttgctggaacagtggccagtcgctgggacttggcgtgagttataccctatctttaattctactaatgtatcccagctaacaaataatagcggcaaatgcgatcagtataccggtaacctgcaaggtcctaacctcaactggtgggaaattcgtggctacctcgaacaatacacgggcgaagtttgttatctttttgattgttgctccggaggatcaggggccttgagcgcgtaccacggcgcagagtttatggcagcctctacctgggatcagacagcagtgttgaatgtccatttctccttcacccgaattctcatcgacgagctccgtcagttaaacggtcaggctgagacgctggctagtatctatgcccgaattttccgctacgcacagcagaatcagattggggctgcaccaatccatatccctaaaccgaattcgccaagcgtgactatcggttgtaatcgctcaaggccggtcacaagaagcgtcgaccgagagtcttacagggtgctacttagcatcaaagtccgggaagagattcccctagatttcacccaatggaaagaatggcttactcgcaatattcctgctaacgttttgtccactaatgtcactgtcgaaggagcatttcgaggctctagtctccttcttttcacggttcctatcgagatctggactatgataccggctgatgacccatcctacacatttattggacacgttacgtctcataatctcctgtcccaacaaccgactcaaacaagcacactaacaagcacactaccaatgcactctggcgctccatctggaagagaaaaccagccaccgcgaagccccaacagaaagccgttcggtagtcctaagcgttgaccatctcgttgaacaggcttggattgtgatttgccattccctccccccccctttgctttgtcttgacttgcttttccttattttcgaacctggataatgagttctactctactcaaaatggaatttttctttcttataattcttcttgaaaaggatccttcccaagcgagctgcgcagcgcagaacatatagtaaaatcgataaattataacatggtattttaacaaccaacgctttcattactgtccgatagcaattgataagcatttatagtatcatatatcagttttgaagaaatcgaaaacttgcattgttatggtatcgaaaaatacatcgctgaaccctagaaatatatatttctcagtcactactcattaatcactttattgaatccctccaaatcctcataagtggatggatgtgctccactccgaggttttcaatggctactagtaaacctggacaaagcgcagagcgtctatgccaaaaccgccttaatctgtgcctcaagtttcttcatgtcaccgccaacaacgcgattcacctccttgccgtccttgaaaatgacaaaggtgggcatagcgttcacgctcagttcccgcgcaacaccttgcagcttgtccacatccacctggataaaacgaacgttttcgtactgctcgctcagtttgccgacgacgggagcgacggccttgcagggtccacaccaggttgcgaagaagtcaacgacgacggggccggaggaagtgagggctttgaagatgacttggctggacggagattaggatggaataaattgcgagcagaatcaagagttacttacttgtcgatctcggtgacctttccgtgagacatgatggcggctgggctcgatttgcgtgacttaaagaagagacggacagcttgtgaggggttagtgtttggttgtttgtttctgttggaagtggtcgaaagctattggtggacgaaggtttggatcataggagatagtgcgtggcagtacttaccaatgtatatcgcagtgaggattagaacggtcttgagctccatcttcagatgtcggcggttctcaaggtctttggtggagcgtcgtgctatttagcgcagcacgtgacctgaaactatgccctatctagaggtacgtgatcacgacatttgaggggcaatgatgaggtctcaagtaccttgggggcatataagtgtcttactccgatcatgccaaatctgggcattggaaacttggcgagtttaatataacggcagccaccaataagcctcgctatctaccggacaaatagcgtgtgatgcgcttgctttttcacgtactattttcgaaggtctagaagcaaagctatgtacttgatacattccctttaaagctaattggtataaaatcttgctatatgtaatatctcgtcgacaaagacaagggtaatgaatatcaaaaagaagcggacccgggccagcataccagactatcttgattgcaggtttcgccacggtaatgcatccctatagtatccctcacgggccgagccataaagagctttgttatttcgcattttcgggggcgtgatccgttcttcattcttgcgaacaagaatagtcggccgcttatacgtctttttgggagtcttttatagctatttccacattatttgttatagctagaatgctagctgtgaaaacgactcaaaggaacaagacaaatttcccatgcacaagctttgataaggccttcggttgagtggaaggcaaattctcaaaatattacccgactttataaaaactcttgcatgatgcttaatatgtaggagcaacattagtttcggtacaggataaatctaattattattaagctcaagaagagtcgatgatccttgatcagcctcccaacgcgaggatcttgaactttggaatgttttcggtctgtaaattctccgactggcttagattgctgtagtttatgttatctcttcgttttttatcaggccttcgggctgtgaactagcaagcccccaatcaaaaaacatgtctcacattctttctaaaagctgtatatgtatgtttcggctctggaatgtagcataggagcgaaggtttcatatatactccggagtccgccgtcggtccatatattcatcgtgaatagccacaaactgaaggagcaagcaataacccccttctatacactcaaacctacttggcatggatttgcgacacgaaattccgaaaatagagcctgggttgagctctaatgacacactcaccgattccattacccgaaacattaccacaaaaaatgctccaagcacgaccggatcgatgctgcgtctttcattatgggtctcgtttgccgcatggatctcgaacttcgacaacggctacgccggtacggtgctgatcatgccgtcctacaaacacgcctttggaagctgcgtgcaagttatagacccgaatacgtatgccgaaattcgacattgctcattgacgccactacaacaatctcttatcagcctcaacttcttgttcgttgccattggaggtgcgattgcgggcatgaccggccgatacttcgggcgcagggggtcaatccaagctggatgtacattggctattatcggtgctgctggaatgcttggcaccagcggtagcttcttgcgctacatggtgtgcagatcgatcagtgctgtgggagttggacagttgattgtatccagcgtcacttatggttctgagtgcattgtcgccaacaagcgcggcctgtccttagggttgtataatgttggacttgccggaggaaatcttgctgcttccgcggtgtgtgcaggttctgctcgtctagaggcaaccaatgactggcagtggaagacacccattttatgccaaatacccttgggggttattctcggtgctgggattttgatgcttcccgagtcgccgcgctggcttatgatacacggtcgagaggaggaggcacgcagctcattcggcgtgctatactgccaaagtccatattcgccggaaatcaccatgcagattgatgatataagaaccaaccttgcaatcgagcgtgcaagcctcaaatctgtctcatgctttgatatctatcgcaggaagcatatcagccgtaccttgatatctgctatgatcatgattggaatcgccattactggtatccaatttgtacaaccatacgctgcactgttcctcaaaggagttggcatcagtgacccatatttgatcaatgttatcatcggcttgtgcatcctaggaggatcattttttggtccgttcattgtggaatatggcggaagaagaattgccatgctttccggctatattgtcatggctgtctgcatgctcactctttcctctgtgagcaccgctcttggaatggatacaagtgcagagatagttatcgtcgttcttctgtgtttgtgggcttttgtctttggtgggactattgctgcgagtgctaacctatcttctgtggagatgcacagcgtctcactccgcacttacggacaagccaacacaacagtgttctatggtatctttgcctttggtgcaacattttggacgccttacatgttaggtgcgggttatggggacatgggtcccaacgtgggctatttttatgcaggtgtcaccgtcgtcatcgctattttaaccttcttgctcgtgccagagactgctggaattacactggaacagattgacgaaggttttgactcgggaataaaggcatggaaaacgtcactacccaagaatagagctattgcttcctctcagaaacgaagtatggcaggtggacacgttggagcttgatgaatgcttctgaagcgtggtcagttggctctgaatgtcataaaatttataaattatagtatatatagctcgggattatcaggtttgactctaagctctaaacttgcaacatcaacttccgatggatagatgatagggaattacctacctaaagtgcagagaagccaaatatcacgcagtacgcctcgaaccgcaatgatcacctaatatatatatatatatcggatctctgtccttttcgcggtttcattgatcccacctgaataatttcaatatttgacgcttttctcattgatacccatttctagtagtgcaaatatacacaagtttcacctttgctttggtctgttgaactaattgtaccgaagtgtccacataccttcccccgcctcccgccctgcgcgccccgccgcnnnnnnnnnnnnnnnnnnnnnnnnnnnnnnnnnnnnnnnnnnnnnnnnnnnnnnnnnnnnnnnnnnnnnnnnnnnnnnnnnnnnnnnnnnnnnnnnnngcgggtgcggggggggggggaccggggggggggataaaccttaactaagcggctcggcagcctccgcaaaccccgaacgaactacactaccttttttatttctcaaatcaggcgttgcgaattccgacaggtcattatggctcttacaaataaatattaatgtgtagtcacagcaacttttctcaccaaatgaattacgacgcgctgcgagctgtgagttccatcacatggctttcagcattcgcatactgatgatattagtgtgacctttgcttctcgagaaaggttgaagaagttcatcgagtgtattcactgcctagagactgatgctttcttgataggttcgctgtgataaacaactacattgtgcaaattgtaccgatgcaggcgttgagtgcagtcgtacaagagctcgacgacctcgccggcaatcaccatcggtgtatgttttcatatgacgctatttcgatctatgcttactatatgaaatagcatatctgctctcggggaaagattgttaacattggaaagaacagtttcagagtatgattaccattcttctttacttcaatgcttctgttgattgaccatttaggggcattgaaaatagaattccatcaaatgttactgatcattacgatggaaatatgccgtcgaaaaaaatgagattagagcatgcctcgccaatagaaggcactccgcaacctacccagaatgaatgtgccattggctcagccacacaccttgcagagaaggcaagaatcgttatacaaggagagcttgatggaaatgagtgcatggaccgtgaacgaaaggcgattctcagatctgccctgcagtttgtggatgttacggggcagaggagaagctcaattaccgacaaattttcgccattagaagtgtcgcatgaagattttcatgatggtccatttattgctccatcaccagagctgctttacatgcttcttccgggtataaaaagccatctgaatttcaaatacatacactaataataatacagagccaacagctaccatcggacgttctagttccgtacaatggccggaccacatctcggataaaacattggagaagatggcttcaaccattctcagtgacaatgaccttgagcatgggcaggaattctaccagtactgtatatgtgtttacgtgaaagccatatttcatcttttccaaaagccgagagcatatatggatccccgcatcaacgcacaatttctgaagtccaagaaactatatgaaacatatgccttccgtgctctcaagaggctcaatttcttgaatgccccaactcttcctctcattcagtcgttgatatctgccgtatgttatcgtgcttccttatacgaaaagtcacttattgataactattgaacaggcatttttcatgcagtatcttggcaacatgagtcaatcctggattttcaactcatatgctgctcgtttgataactgctctgggctatcatgaaattcgcaatccgcctgggatgtcaaacctcaatgaagatatctatagtgctgtatgctggtgcttttaccttgaccgaactctgagcacccttctttaccgaccattgtcgctgcccgagccctgcatctctcctgcaaatctgattagcgccgaccaaaatttgccacatatcccattaatacgaattctgttcgatctagctcaggtccaaggagagctgttgaattgcggaaatgcagataacactcgccagataatcgccaatcattcaagacttcaggaacgaatggaggtcatatattcaagattacaatcagtgagtttgactaaatgtctgccttccttcaagctaacttcttgttttagagtcgagtcacagcccctgactgtatctctgcagattggatctcaggcgaattttgctattacgccattctggttgatatccttcgatcgcgcttaaaatgtgcattttctcctttgacacacaaggaatgtgtatcatattctcgcaaatctctcagagcactgcatcatcttcagaaaaatctcgcggatgttccaggcttcgtggatccttatccctcattcctgacatggttagttggtctagtttcagggttataagttcttccactgatatttcctcaggactgtccttctatacccattcagtccattcttcgttctcttttgcaacatcattggagaactagacatggatgactacaatctaatgcaagaaatcacacaaagtctatctcagttcgccgcaagtccatacatctcaaaactgctgaaacttctgtactacttgcagaatctctgcgtaccattgatccaagccaagcagcgtatgggcccgcaggtcaaagttcctacattgtacccttcgatggctgggacctggcatgtgggcgatccagctagtgatgaacattcacatctcttgatgtctagctctccatatgtggatcctgtcgctgaaacaaaccttcaacaactacaaacaaccagtgatggaagctatgcacctgatgatgcgttgatgtggcaattattcaatagccaaatctcgctggagtggttcgagtctaaccctttttcttattgagaatactcgaaacttctcatttccttgtttatatatagaaaagttgtctgtacgatttatgcttttaattttatatacatctaaaacttaaaaaaaagaataccaaataaataaatgacctcatgcggccggctattcttatttctaatcctttgatttctttgcctttttgtttcacgactgcttgttacttgcttgtctgtttctgttcagattttgggcgcatactataacaatattggcatgctattgccctaaccaatctaggttttccctaaatctctagagttattttggcgaaaatctactgtttcccaactccagtcattttatatgtactagttagttgtggatgcgtacataatagtggggccaatatggctcagcctctcagcctcagcctcaagtgtggctgattattcacagtcttagactgaaggcctattacctgttaggtagttatgacagtttcatgagacgcagttgtgatgctaagccttcttatgactcaatcgcaaacagagggcatttacctaggtacataatacataatatataatgtatgggagccattgtcggggaagaatctataccaatctgaagacatctatatatgtctcacttatagataacacattacacattcaagtaatattggaaatattcgcagacaaccgtggacatccaccatttaatatcattccaacaacctcggaataccagcggacatagtgcaggtcgtggcaggtgaaccccgttggcggtggagacagtgcctttagcgtgggcgcagctgattccaacacacctcaaatcttacccccctcaaaacaacctcctagttttgcatctttactagacttggtttctcttttaccaagactagtatatcgcgctctacggtttcattggggatgcccagagtcagctcttcggcagcgtgttactggcccgcgtggtcgttcccctcattcttgaaatcagtctgatttgctctggactagtcactcgttttgccattcacttgagtgcccaagacttcaccccacggtcctactaaacaatctctcgcgcaattctgggcgcgtcgagtagagccgagccgagtcgacatctggtcggacccctccgaaatcatgtcgcaatatccaaacggtcaacaggcatactatggccaatctacaaacccccaagcccctactcaaccatccaccggccactatgacaattatacccccgcgccggacagacatctgcctcgaaggatgccgagttacaatgccggggatgattctggattcttcaaccctgtccagacccagaatatgagagcgaccgaagaaaacagccagtatgcagcacaaggcggtggttatggtggcagcgcgggacagggtggctacaatgatgtgcagagagccactgaagacgacagagactcgagatattcgcggacttcctcagacgccatgtcgcgtatgtctccgagtcgggcctcttcgcaaacctccactatgtcttatcaataccaatactctggagcaccctcgtcccagacggcctacaacccgcagcaatacggccttccacacacgcagtcgcaaccggttctcgcttataacccccagacgtacactggctccagcaatgcttcatacgccggtcccgccttgggccatcaaccatataatcctgcggcataccagtctaccgcaatgtcgggaatgagctctccggttctacctagaaggcagagcgcagcttcacactacgggcagacaccgccgactccacaatcgtatggcttttcccaacaatcaccgcttccaccgccaaggggcgccgatcatccgtatggaggacgtccgtaccaacccatgtcaccggtcacctcgccttcctatgttccctcaagctccccgggcataatgcatatgcctccgcctacatcacgttcttattacagcaacccacaaggggcgtcgtatgatctgccatctcctcggtataccccagcgatcccaagcggttccttcgaagagcagcctccggcgcctccagttcatcagactcaagcaaatggcttgtacggcaagcggccaagtgtagcagggcgaaccctgccgacgccccctgtgcagctagacttgcctcaacatccgaggcgaactgagacgttgactcgacacccccagtcccggcctcttcctggacccccagtcgatgaagctgggctagatggcaatcgttggccagcggaacctcctatggcatatgaaaatgtgctcagagaagatgaggactctcagaacttttcccgtcacggctctagagcatcccatgctagctcccattcacgcatgcagttcttgccggatgaggaacaaacccacaccaacggtaatatagagacagacactggtcatatgataaatgacgatgcctacagtgaggaaagcgacccagaggctgctgctggtttgattatgttgcaagaagacatagcgcgtgaggaacgtgagaaagggcggatgcgacgtgagaccaatgcgtcagttctcagctcacgtggatccaacatatcgccaagagagccttcaccgcactctgattcacttggagataacgagttcatcggccatgacctttcgcaggacgaagggggctaccaagcaaacgtgcactacggtatttacagttcggaagagtattcggaccctgccgcgggcgacagattcccaggcacctctggttcattcagaagctccgggtcccccgatgagcgtggggagtattataatgattacgagcacccgcctattgcatatgattatgccaggcgcctccatcatttgccggccgatgccagggtagatgccagtggtactgggggattatcggcaccggatgcctattcccgacggatgagctttgactatggcgatgaaggagaatcaccatatgatcacacccattctggagatcaatccgatgacgaaagcgcccaccgatccgcacacgaagatctgttcttccaccctggaatgcgtccattgccaccagcacctgtagagcctgctggtaatgttgatcttgtgtcacatctgatgcctgcgggcacatataaccgccactcggagcagcaagatgacttggacagctattcacagtataacaaccccgccttactgaactctgcggattcttatggcgaggctttgctaaaccagtcccaagttccgcggtcgtcatctttgtcagctcccattgggcctcgtactgatgcacccatcagatcgaagaccgacgcggaccggctcagatacaggcagcagcagcaagaacttctcttgcagcttcagcacaaggacctgcctcatatcgacccagcggcagcagctatgacgctggatctgccaagcatcccggctggccggcgcaagagattccatcctgcaaagctgtcatcggaacaattcaagaagtgtaccgagccgtgggctttgagctctctcttgtcctggattaaagatctgagtgaggatgaaacagatctcagagagcaagcaattgccgatgccatggttgcgttattcactcacaaagtccccaccatgaatattgctgatgccgagacactggctgctcgagttgtgagtggcatgcttgaagaaggtgcattggtaaaagaagaagaatgggtcaagtttggctcaggcactctttcgggtatcctgttccagatcactggcactggatgttactctccccggctccacttacatgagatgcacattgagggtactgatagcttcggtcgatgctactctcatcactgtatgcgaacattgaagaaggtcaacctcaaggcacagatgatggcaccgcagaagaaaatcgaggactgggtcactttctacaaggtccccaaggaggtctgggaagctcatccgaggaaagaggtcgatcgacagaacaatctgcacgaaattgtcactacagaagactcctacatctcacaactggatgtcctacgagaactatatcgtgatcaattggctaagatgaatcctcccatcattccggtgaagcgattacccaaattcttggccgacgtgtttggcaaggttgatgctgtgaagagagtcaacgaggatttcctgttggcccagcttaaataccgccaaaaagaacaagggccttttatctctggattcagtgacatcttccgggaatggattcgcaaagctaagaatgtttacatcgactacgctgcaaccttcccaacggccaactatcttgtacgcaaggaggctgaacgcaacccgcacttcaagcaattcctaaaccaagcccgggaacacaagctatcaagtcgccttagctgggatactttcctcaaagccccgatcaccagaatccagcggtatactcttctgttggcgactgtccacaaaaatatggtcaaggattccgaagaaaaaggaaatttggcacaggccattgaagaaatcaaggtcgttgcgctggagtgtgacaacaaagtgggagagatgaacaagaaggccgacttgatggagttggcgtccaagctgcaattgcggcccgacatgaagaaggaagttgaactcaaccttgaacacttgggtcggcagatcgtctatcgaggcgaactgcaacgtcctggaacccgtacaagattccttgttgatacacatgccatcctgttcgaccattatctcgttcttgctaaggtattcacgatgcgcgaccgggcagtgaagtacgagcgatacgatatctcgaaattgcctatcccaatggatctattgggccttgaaagcaccgacgatgatcccgtggtcaaatcatcggtccggggagtttcgactgtcacaccttcccaagcaggtgctgccagccctcttgcacatacagggtctggtgcttctggaggaaacggtgctcttgacaactcaagggatgacaagattctatatcctttcagaatcaagcatctaggcaaaactggaacatatactctctacgccttttcagcgcaaagccgcctggaatggtgccaaaagatcatcgaagcgaagacaaagcatgctgctgctctcttctcgcaaaatgccgagccattccgactgcgcgtgcttgcggacactgcgttcgcatactctgatcatacacccggctctaaaagtgtcaccatcaagggcacccctctccatcgtgcgattgtggaggtcgagaaacaatatgaaagctctaaagctcgccctcctgcgatatgcaagactgcagtcaactgtgccacggtgttccaacagccacctgggcggattatgtgtgcaattggcacggactatggagtttacatgtccgagctcaataaccccaggggttggtacagggctattcccatcacacgggtcacacaagttgctgtctttgaggatttcaatttgctgttgttgattgccgatcggtctttgattgcataccacctcgacgtggtctgtcccgccaatgggaaaacctcccaatcatctcaggattctgcccgacgagcaccgcagaagctgtctggaaatcgtgaagtgggcttctttgccgctggtcgcctgaaggaccgctacttggtcttatacaagaagcgtgagggtttgtcgtctacgttcaaggtatatatattcgcagcaaactcgataaagtaacagcaaactcacatacaaaatttaggttctcgagcccgtcctgcaaaaatcatccacaaataagggccgcctgttctcacgtcgctcgcaaacggagttcttccgcgattacgacgagttctacatccctgccgagacctaccgaattaacatgttccactcctcgcttgccatctcaacccaaaagggcattgaagtcctcacccttgacaagaaactttcatggtctgtcccagattttagctccaacgatactggagatgcacacgataccctccacagcattgccaatcgcatcagcgggctcaagccgctaggcatgttccgtctcagcgagagcgagttcctagtagcttaccagcagtgtgctgtgtacgtcaacaagcacggcgacgtctctcgcagtgtagtcatggagttcgtgggcagcgcacacacagcctgtctctatggcaaattcctaattctcttcaacgacgacttcgtcgaagtccgcaacgcaatgaacggtcgcttacgccaggttattccgggccacaacgtcgtctgcattgacgacggtagcaaggtgcctggctcgctcaacggcaatgcacaagccaacatcggtggctcgatgggtctttcaagcggcttctctggcgcggccaatggctccccgggccccacgggcatgggcaacacggtcaaaatctgcatgcagcatccagagtatgagcgaagccagcttgccttggaacttgtcgaaaatgaggggcaaaaagactaagtcaataccagtcgaccgttttggggtcgccctgcctcatattttggtctcattttgggtttcatacttctcttggaacttcacccccttaccctttctcttcgctttttcgtacacctttcattcacccctttttcaacatccctttctacttttgagccttttattctccgccgtggttacctttcctctatagagggtggcccgattcttcatgcctatgcttgttttataccctttttcttcctctcttgcgtgtcacacaatgccattatacttctacgtcgaacttctacgtcgaaggttgatggtgattgatcgcttccacccctgggattgttccagtcggctcgatgatcatgctgtacatagaaaacgtcactgcatctcatgacttgacgatttcctgaattcagaacactttagtatcctgggcgactttgcccctacgaatttgattagtggaaacattcaggtctcaaatctatcttttgatttcgacatatttattcgaatcgcaaataccatgtaggatttggtacatgtacgaagagcgctacgtcgaatccacatgtctaataaacaagaaaggttcattctttctaagagatctagaactccaggttccaatccaaggggaaccacgcaaaaagtgaattgaaacatccaatccaagggttgtagtacaaaattgcataacgatccaactaaggattcgggaataagaaaaacagatgagatagcggctaaccgtatatgaaatgagacagtatgcaagaatatcatgagtcaaactcgacgagcttgctgataacctctccatcgcgggccgtggaagaatcaccgctcttagtggaagcagcagagccggagaccttccgaggagcgtgggtggcatcatccttcccgtccaagagagaagttctctcttcctttccgccgccaagcacctcagctccttcaaggaggtcacggtcagcgtcacggacaatgctacgacgttccgggtcggcgccgtatgcgccagcgccccagctggggataccaccggggatggcggtggcagtgttctcacgacggggatagtcatcatcgtcttcatcgtcttcttcttcctcgcggccgtgagcgagatcacgctgcgcctcgtccattcgcttcttgacttcggcggccatgcggattccgtcggagacgatgttgtcgaggacgccgcgcaggcccttgcctggtggcacgatacctcctgaggcgccagcgacgggcgctgagccagcgctgagtccggaggaacggacactgccgatgttggagaaagttgtgagattggacgacattgaggaagatgcggctagagccgcggggtggggggggtcggacagatggaagggttgggggaagtnnnnnnnnnnnnnnnnnnnnnnnnnnnnnnnnnnnnnnnnnnnnnnnnnnnnnnnnnnnnnnnnnnnnnnnnnnnnnnnnnnnnnnnnnnnnnnnnnnnnnnnnnnnnnnnnnnnnnnnnnnnggaggggggggggggggcgggggggtgggggtggtcggacagatggaaggattgggggaagtaggattcaaagaattgctctaggagttcgtcggccaggacaaccattcggaaggtagggagagtgatatgcaggggattattagggtcgagagccgggttggcagactcagatgttgagcggttgtggtcgcgactgtctaatccgacggtggtagacttagctgactggggagctgcgtctggtgctggagagttggtggacttggcatcatcaacatcgatcaaatcttcttcgtcgtcgtcgtcaccaatggcaaatgagtctagcttctcggttgcctctactgttgtatccagcaggtctgcttggtggttctcttggtggctagggtcggcgtattcgaagcaacgacggatgaatgcgctgacgctaccgaggaatttctcgtcagtagtgagcgagttctcaacaaagtcacggtctcccgacaagttcagatcttccacagatggggtggccgtgattgtgccctcgaacccacgccgggagagaaacaacagcgcctcggacatcttgaggatcccctcacgatcaacctggccatttccactgtcatcgtacaggtcgaagaaatagttgatgttattcatgatatcaggggatcctttaaggcgggcaagaccattcaccacattttgaagattcaatccctcctcgggatctgtgccccacttgcggtagaggcgttgcataaactcatggtccgctggctgcctgcggttcgcccacaatgctgattttcctgatggggattctctcctcgagggactaggggagtcagcaaccgcccatttagatgtggcggctaaaaactcccggaaagcatcataatccatatgtgtagggctaggtccaaggccaacacggccaacttcggtgtctgcaggaggggcaagcatggaaaggcgttgggatttcgatttcttcctctcttgccgcctcgcctcttcctcgataactctctggtgctgttcccattggtacagcgtttcatagaagcggtcatatatcgttccaagatcatccacgctcaggcgtttgctctcgggtccaagattgcggatagaagtacgctttgcaaaagtctcgatattctctaagacagcacccttgtgcttttctcgcgtctcggtgatcgtgctgtgagtgatgccagaaaattctttgaaagcaaccaccattaattcctggaatctagtaatagcccgcagcttgggattctccgatctcgggtgggcagattcatccaatcgggaaaaatatgacttcaagacagaaataaatgatccgtcatcttgtgtctcgagaagctcctcgccgttgactcggaggatggcaagaccgacctggaagaggacctttggcccttctaggaaaaacacatccaagacacggaaagcaaagacgagcggcatagagttaatgtagagagaaaggaaccatggcaacgataccacagaaagttgtacgtctgatttggtgaggtgatcccagagaaccggcattgttttctcaactaaagactcaaacaccttttgatcgagtagtgtgccgtacattgtggttgaatagtaaccgggcaggagacggtcacagagcacagagagaaggaaaaaggcctgggcctctgacatatatctggtcaagttagcaaaacgccctcggcaacttgggattctaaacatacatcaacaatgcggcaaccacaatgttcatggcttggcaatatccaatctccgggtcaatccaactgtacgcagtgagaactcgtcgcaagcgtccaatgccttcttcgctctggaatccaggatactctggaagactgcgattcaaatctttctcaatctcatcgatggcaagggattcttgtccctcgaacttggccaatgtctgttggtacagctttggagattgtagacgaaggaacaaagaaccggatgtgagctcccatatttctcctcgtagccgatttggcaaaccaactctgattagcttgtggaaggttggttggcgaaccaaagtagcattccgaccattttctggagaatatcagtcacatgtcggaatatacaatcaaaaaagaatgtctttttacctctgaaatattcgccccaaagtctcatcttactgcgatcgcgcagcttgcgtgcatcaccagggtagcggaaaattagacccagccccgcatccgggggttgacgagtatcagcttcgttcccgtcttgtccctttcctttggcgcctgagagcaaatattccgaataacaatctgagacgacggtccgcaagctgtcaacctccttcattgcctccctcaggcctttttttagtgtgtcacaaaatcgctcgcaggcctgtctgctaccgacaagctgcaatatgaggcgttgaggggcgaaattgggttcttgatgcttattgagcaaaccattccatgttgtcagcgccaaagagaaaacatggctggcgctatgaaggcgttcgacacgtcgtatgcaggatagcgggaggatgaatccattgcctgatggtccagtgccgtgcgtttggccagtccaagtggtcgaggcacttgctgtagcagatggaatgaagctcgtgggctgggttgaaaagcagatgaaacgttcacttagatgcaaacgtccagtgtatgtattcccagcccggtcaaccctgcgagtgccatctccttggtttgacgaggaatttggtagtggtagaacgagatcagcggtgatctcttgaagcgggttctgggaatcagggaggcggaattgttgccggaacaacgatgccttggaggggttatgatcgggcgaggatagggcggaaatgttgaaattggcagggtcaatcaggctctgggccttctgaacgaaggacgaccacggtatcatgttggagagatgagggtgtgaattcgataaccaatgatgtcggaatcaagctcagttaaagacttcgagttcagcagatccgggctaggagtaggaaaaaaagcccgtgcgtagttgaaattggagcttcaaggtcatcgtacaagctaaatcaaccttggccgaggactaggcctgcagaacaagaggattgcgtcgagtgttgttgcggattgataagagggggcgtgatgatgctggtttcacgtgactgtcctcagccttatccataatagcttggcatcacagcattcttcgaaagttatacgtggaaatgtcctctacagtaattattcttttcgccattctagccttagatattatacaatcagcgctgtaggtcagtggctataaggggagggacatctaccagagattcaaagatatcgtacgcagtgtttacatttgtctaactatatataacgagtgtgaagttaatttctagttctataatatgccccactgtgagtagtacaatggtctacgatcctacagtctacagagaagagcctaagaactagagattctcaatttatgaggcttagttgagatgaatataaacactgcacaagaaacacaagtctgagacagaaggacgcaaacatattatgatcggacaaaaatggggaattgaaacacaatccaagcttgacacggaagcaaaaacacacacatttgaaaccaaagaaaaattgagaatagaacaggatttgagaaatcttaatagagtgaaagaaatatagtgaaagaaaatatcggaatcaaacaggatgtaggtgaaatagaacggtgaaatagaacaagaatagcgaacaagagaagatttaggaacagaacaagaaacaagattggaataaaaccaagctcaacgcaatcactagacattgaaaattgactgtgggatagcctagtggtgtcaagagggccttgtaagaaggattgaacatgaagaaaagaaaaagagcctggatcggctagtagcggtcacagggcaaaagacagtggaaaatgaaattccctttgttcttgtcaagtgaccggagctttcagttggcggtggaaaagaagtggagagcccagtatagctggtgattgatggacatgccatgggtcaaacgacagcggaactttgtggatttgtttgtttgtctttgttcgtgtcgatgaccccgagtaagatgggcttagtgcgtgctggcccattggcctggcaaatgagtggaaagcctaggcagtctggcaatgagatagctgagcgttgttgtattttttttttactttgcttgtggttggtcttgttcctgcttgatcttgtttctgtctttatgtagtgaccggtggggggttttttttttttttgttggtattgacctcgtcaagtcaccgttggcgccagagagcttgttgttgtccggagtgtcgttcaagtgaaagatattgaaaggtccaggtagcttgtgatggcctttggtcgaaagacggcttgaaggagtgcattttgtattttcatttgtgtttttgtattttttttgtattttttggttcagtgatccgcgggtttgggctgtccgtggaaggagccgagaaacccccaagtataaaatcgagcactatccaggcaggtcgataatggccttcaaacaagagacagctggcctcgatgggaagatcagtatgtccctttttttttttttttccctcctctttctctttcccttttcgtttttcttctttttttttcttttctttctttagttcttgtcgagcgagcctcggacctgcgaaggctctgtgtattcaggaaggacttcctcggagggactggtcataagaccctgcttttcgcaggcctcgccatcctcccaggcggccttgcgctccgaagaagtggtaccgcggtagcgttgccagaggaaaaccacagcctggccgaccagcatgccaatggcacttgcggtcagtccagccaggacacccaaaacagccgggacaatgataaagtgaacaatgcgtgaaaaagtgcgggcgaaagcgccgtggtgcgggtggtgatggtggggacgagcggagccgtgggcgtgggcatgatgaccaccggggccgaacttttcacgcccagaaccctccttcccgaaaggaggcgggggagggtaaggcatatcgtcatggtcttcttcgtggtggcccattatcttgccctcgtgtttgccatggcagcccttgtggccggatttggccatgcccatcacacgagccttggcgccagccaagaggccccgaatgcgagagaccagaagttcttgcaggcatttggccttgccgtggcactccttccaagacaggcgatcggaagcaggggtgttgctttcgatttcagtccgagcgatgaagagctcgccgttgggatcctgtaggacggtgatcgccacagtatcgacagggacggggtgggtttccaggtcgagaacagtgaatcgaatatctaggagttcgtatcccggctcgtcggatggtacggccatcggcatgatttcaagcgcatacccaacaggcatgggggcggagtcctctccctcttcattttgttgcacagcaagaatcgggatgggcggagccggtgggaatatttggcggccgttggccaacaggcggttgtcctcgatcgagaaatccagagtctatgagagtttgttagccagttcgaatgaataaacgcattttgtcattcttaccagagatgatggtttgccctccgtccagataacagcaccttcgtcattggtttcacgaagaggacattcagagcaaggcaggtcaacaatcgcatgacgaacgtcctccagaagcatagggtggatattaacaaatccatcttcaataatatcgactttaggttccatctcggggacgaccagcatggcactggcgccgagagcagcggcgccacccagcaaaagggagcgcacaaacatggcggtggtaggaaatgatgcttaacgcaaaatgaaagtcaaaagcaaggcgatgcttctcttcttgaagttgatgagatgagtagactcaataacgatgtggtgaacaatatctcgagggggtagataagtgcacttatcttctttcagcgggatgtggagtgggtgacgccagctcctgcgtggctcgtgctgtcattggtccactggtggacagtcagcctgctgactgtgcaggcggcatctcccgggcttggacaatcgtgttcttattcgtaggctccagactgaacggcgacataccgaggtatatcgttcccctgatattatttaaaaatgaggatggcgaggactccagtcctatgcctatcgggtatgcattcgaaatcatgataatgtctgtgcgatacattcgcttctagctaccaaaagttggcatgtgctgtggacaaaaacatggtactgtggtatacgttccgaggtgacgaaacacaacctcgatgctagcgtgtgttgctagcgtgtgtttttatccaggcgcgaaatgcgcatagtccgcctggtgaacgtgcaggaggcgcagtttgtaaccgtgccacgcttaggtgtatactgcaatatcatgttttcgagtttctgggagatcatataatgctcccagattccggagctggcggttgttataaattcgcatggtcagcctgctgaacgtgcaggtggcatctgtgctatgttgcctgcccctgggagctcatttaatctccccatctcccagaggctagctgtcattgctgaaattggtttgttcagcgggccaactatgcagatggcacccgagaagcctttgcgcagtccacccatagccgactccagaggtatggctgtcgctggattttgctcctatgccatgatgctagctcctgggagattaatgatgttcccaacccccaggagctggcatgctgttgtttgatgacggcatcggcacggccagcctgctgcacatgtagacagcattagatcgtgttcatgccatattgccagcctgcagaagatcatataacgttgctacctcacacaggctgccttgtcgttgggcgaacaggcttgttcagtaagccgaccgaccatgcagccagctcccgagagatcatacgatgccccccatccctaggagctggcgtactgttgcaaactgcatggtcagctagcgaaacatggagatggcatcatatgccgcgtagccagcccatgggagatgatatgttgttccccgctcccatgagctggcctattgttaacgcgatgttgtcaaccactaggagatcattgatgtcccaatatcctgggggccgacgtgttttgagtgaatcggcgtgtccagcaggccgaccatgcgatcaactcctaggaggtcgtgtaatgttccccattcctaggagctggcgtgttgttgcgaagcgcatggtcagcccgctgaatacttgccatattgccagcccctaggagataaaatgatgttcctcatttttaggagctggcgtgttgtgagtgaattggcgcgttcagcaggctgaccaggcaaccagctcctaggaaatcatataatgtccccatcctaggagctggcatcttataggtgaattggcatgttcagcaggccgaccatacggtcagctcctaggagatcgtacgatccctattcttaggagctggcgtgctgttgcgaagtggtatagttagcctgccgaacatagagatggcataacgtatgccatgctttgccagcccctaggagatcatatagtggtcccatctcctaggggctggcgtcttgtggtgaatgaggttcagcaggctgaccatgcaacagctcctaggaaatcatataaatgtcccccatccctaggagctggtgtgcttttgcaaactgtatggtcagcctgccgaacatggagatgacataacgtatgccatgctttgccagcccctaggagatcatatagtggtctcatctcctggggtccggcgtcttgtgagtgaatttgcgtgttcagcaggccaaccatgcaacagctcctaggaaatcatatactgtccctctcctaggagttggcgtgttgttgcaaagtggcatggccagcctgctgaacatggagatggcataacgtatgccatgctttgccagcccctaggagatgataatggtcagatctcctaggggctggtattttgtggtgaatgagcgtattgggcaggccgaccataccgccagtccccaggagatcatataacgtctccctcctaggagctggcgtgttgttgcaaagtggcatggccagcctgctgaacacggagatggcataacatatgccatgttgccagcccctaagagatggtaatggtcagatctcctaggggctggcgtcttgtggtaattaagtgtattcggcaggccgaccatgccgccagcgccgaggagatcatataaagtctcccttttaggagctggcgtgttgttgcaaattggcatggtcagcctgccgaacatggaaatggcataacgtatgccatgttgccagcccccgggagatataatggtcatctcccagaggctggctaatgttgccgcggcgtgttcagcaggccgaccatataggcggcattttttgtgccatattgccagcccctgggagatcatgtactgtcctccgctcccaagagctggctgttgctgaaggtggcatcgtcagcccgctgaacacgcaggcggtagtctcaatttgtggcgtcacaagtcgtttccatgtgcaggcaaaacgacgccaatcgcacatcttctacctagtttcctgggtagccgaataatatatacccgaatataatatatactcaagggcccagacattgtactcgaacaagacgtctttcgacgacaaaaaaatcacacttcgccccgaagggtgaacaacaaacgaatcgtacatgttgtctttcgacaaccgacacaaacaatcatacaccaccacgaagggtgggcgaacaagaaaatcaaacacaactcagaacaggtaccccgataaaatgccatgggcgtcgacagtgataatcatccatcaccttcccgggtgagagaaacaggggtactcaaacaatggcttcttatttcggtgtcgttggtaacagacacctgtcgctgtaactgtgcaggtgaagtggcaatcatcggacttgccagcttgctgcattgtcttttgcggtcccaagaggtggctcattcgtccctcccctcgggtcgctttcgttgtacttctgcagttgaagcggcaatcatcggacttgccagcttactgccttgctgtggtagtattattcatcaagaggtggctcattcgtccctccccttgatgggatgcgcaccgcaccactttccgttaaccgaacaacgctcgatcgccggcaaaacaacgaaggagaacatagataatccgatcgaagattggaacgtcatatccgtgctcccaacgcagttcctccaggaactgttcaggaccctccaaggcgtagactaggtgtccaaggtgacctgcccacagggggaacgacagcaaaatcaccatcaccatagcaaatacaccaaaggaaagtcgacgagttcctgtccacaaccccctcagcaaagccgacccttcatgcatgtctgactcgtcagacacagtgacggcgggtgggtcggaaggccaagctcctggcatttgaagaccagaaggcgctgctccgcccatttcctcccgctgttctcctgtattctgtcgagcgctgcaatttgaggtttcggcatcctcgaccctcttggtgcctttcgaaacccccgcacgggaatctgtccctgttgcaacggcattctttaccgaagcgtcttcgggactggcgaccagggaaggggtggagatagctcgagaggttgctgtgacctgcaacccctcaggagacgacataatgctaggacgagcttgagtccttgccgcgcgcgcctcaagcaacgcatctaggtgcgagcgagtaactgtccgcgggctcggaacaagttcatcctctgtctgccaagtcagatctgattcattccgagtcggcttagtagcagcaggcacactcggaatttcctcgactgacgatggctcagtttggactgactcagttggggctggctcactaggagcaggcgcaccaacaacttcaccggacaaagtgaacacggatgattcgagcgtagtggactcgggcacagtggactccaaggcagcttgagttggctgggaaacagctggctcgctcatcactgcctcgggaggcacatgcacggtcttgagagtctcatcttcctgcgatgcaacttgagtcggctgagaaacagcgggctcacccaagattgcattgataggaacctgctcggtggcctccaggacaacttgagtcggctgcgaaacagctggcacactcatagctgtctcggtgggcacctgctcggttgagacagtctcggtgtacgccagaacagtctgagttggctgagaaacagctggcacactcatgactgcctgtgtagacacctgctcggcctcaacagactcggtggactccaaggtggtctgagttggctgcgaaacagctggcacactcataactgcctgggtgggcacctcctctgtctgaacatgcacaaattgagctggctgcgaaacagctggcacactcatctctggcacattcgcggctgtatgcgtcaacttttgtttcttccgggccggctgtccgtcctcgctggacccaaagatatcagctgtccgtttgagtactcttcgtacagagagatagtcaaccctccgatgcacgcgagggcggccactcccgacgagacgatcccgtcgtttgaagacgcggaagcggtcgcggacccttggcataccaggcttgagagggatggctgccacggcctgcgcgatgacgcgattaagtgatcgcgtcaatgggagagacgggggagcgatagcagcatgaccaccagatgactggctcggagccgccaggtcatctttgttgtacagtgtgatcacatgcgtctgccccttatcccattccatgtgaccgtcaaaggactcgtcgttcaactttgcgacttcggaataaaacagctcgtcgtcgagttccatcatgtcgttcgtctccacttgctgaggagcgatagtcaaggtggtagctagtgcttcttgcaccactaccatttcgtcgcacacctcggcctgcaacatcccagcaatttcttgtcccgtggtctcagtactgatatccacggtctccacctgctggggagcgatggtggcggtggtagctagtgcttcttgcaccactaccatttcgtcgcacacctcggcctgcaacatcccagcaatttcttgtcccgtggtctcagtactgatatccacggtctccagctgctggggagcgatggtggcggtggtagctggtgcttcttgcaccactagattatagtcgcccacctgcgactcatctgcctgcaacatgccggcaagttcttgtcccgtggctgtgtctatgtgtgacccagcccgtgatggtttttgactgatcaatgatctagtatcgtcccggcgcgagcggaagttagcgtgtcacggtccccagcgaatcgatcgagggacgattcgcggacggagagagggaataccagtagaatcatagacatcggggctaaggtcatcacattcgcgatcctcaagggggagcgatctcgggccacgttcttttcccttgtcgagctgctgcgggtgggggtcgaatgcctgcccgtgggagcctggttcctggctttccacgacgtggcggcgcgcaatacccacagggctagccgaggactcggcgctacttgccttccgagtctggacctggcttacccttgtgctttgcatactcgcggcaagcattctatccgcattgtcaaggaggcctttcagtcggtcctccgcacctgcaaggcgtgcctgtcgttgctggtttcggccggccgccgcaaccacctggcaaaggtcccgcaaatctgcctggtccctcgccagcttctccttgcagtcgcggagggcctttttcttgccctccgcttgctccaggtcaacagatacctgctccaggtcgtcctcaataacctggaactggcattctatttgcgaagttctgttggagtttgcctggttgatcatggcctgcatctgctcatgatcgagaagcttggtggtattgcggtcttttgccatttgggatcgcaaagccgacgcctgggacctggcgtcgttcagtgcgttctcctgacgagatattgtcgcttcggcatcagtcagtacttccagcgcgctggcttcaggctgtttctgaggtggtcggataccggagggggattgaagggctgtgtcggggcccaccagaggggaggtcctgtgcggaggactctggggaaagtaggaggggcggtaggtggatgagggacggtagattggtgaaggtgtggccgacgaaggaccaggcaccacctccgtgccaatgggtccattgcgggaaggacggtacatggctgtcggggaaagcttgtcaattgacgaaggaccaggcactacctccgcgccaatgggtccactgcgggaaggacggtacatggctgtgggggaaagggtggcaattgacaccgggccaggtaccacctgcgtgccaattgatccattgcgggaggggttggctgaggcgatcagagggatggcgggagtgggggcacccgtcatttggaacccagtgacgctgtcacggcgacggcaggtccgtttctgttggtttgccattgcgagctttggaagatgttagaagagaagctggaaaaggttgcttgtgaaggcaactgtactcacagaaaaggggatgaaatggcgcaggatttggatgagagtctcttctcaaatactatgggataaagtgtcagaaacggcagataggtcacttggaagagtggttgggactaaccagaagaagtacgtggattcacaaactgtttagtctttgcagatgcagacgaatatgaaaaccgagtacgatgtggaagaaagagagaggggaagaaagaaagagaaggtgtgtgggaagggcagaagatatagccctcgacaaacgacgtgactcttgaggcccaggctcctcaatggtcaatggcctgactcaatgactaggtcttgcctccctggaccaatcaacaggcttcctcattgtttgtcaatggcagggtacttcctcaacaatggctattatgacatgttcaataaagagaacaatgggttgtctccttggtgccttgaatggtctttttctaggaataggacgtctcgttcaacaatacaacacattaatcaaacttctgaatttatgtctattcaactgtacattttctagaattagctctgcctagatattgatatatgtagatgctccatgtagttgcggctgaatgtggtcgacttgccgaaggtcagtgcacttggcttactgaatagattggtcttccttggtttgatgaatgtattgcctactctgtgccagttgtgatctataatcaaatcatcgttggaattcctgccaccatggctcttggttgaaagaccggtcttgtccctgttgttctatcatccagaatgataactcgttatcaagagtcgatctgcatgccttggtggtttcctactactctatgatacgaaaatgttgagtttcaagccctcctacaccggaaatcactgctgactggaagatcatttcccccagggccgctcgtgaggtcgtcacctcggtcccacaaagattccgaataggcgcacggtacgggtacgggtacgggccgggcccgtcacaagcaaaaccaggcacatccagcaaccaatcaacaagacgtcgctagcattttacgttgcgtcaaaacagaaagacaaccactagactcagtctacatctccaacaatacccaatggccttgacactcgagttcggcagaaacttgcgacattagatcaagctaaggtacagacacttttcagatgacacttccacgcgagaccttagccgtgcagtgggactttgcaatcatatcaagtgatctttccaagacagtcaaaccgttggtgtggtgtattatagggtcaaggtacgtgtcgtgtctctttcgctgggattacttgaaatattccaaaagatactaaactatgtttacattagattctctatcgaaaaaccgaggatccttcagaccatcgccagctcttacagcaaatacgcgtcaagttgtctcacccgccacggaacgaggtacaacctgtcggctcgcccttaatcgtttcaatcctctttagtagcggatcattcagatgaggagagtctgggagctttggaaggtttctacaaatgacgaatgatatttgctgcgagaataagaagagagcaaaaaacgattaacgattcaaatggacaagactcattctcaacactaaagatcgatcgctatctgcaactaatggagtgatttgtctactctatgggttggcgctcatccaaccaaggtgaccggggctcattgataaagacacggactgcaaagaagtcaatgtcgagtatcatccgactcatatatcacgagctttgtcctggatttgggtctagagcatgtttctcctacagtgactgacatattttgctacagatatttctatatttgcttccttgacaatttatatatagagccatgattatataaactaaaataaacattatattgaagaggaacatgcacgatgggcagccttgtcatgcaggcaagacgagaacgacacaacaacaccaagcatccagggcggtcagctagcaagcatagcgaccacatagatcacaccatagtatacgatctcctaatgcacaagcatctcgcaactttcttctcatttccggggtgatgaactgactagactacctgctctctgagactctacttagcaaccgggctctcgcttttctctgcttgaaggataaggccactaagtagggattccgattcccccactgcaatatattgttaggattaatggatcctccggtatgctccggtatactgatctgcatactccgataaaatctactggcctgagaaatcggaacatgaaaacaagtatatatgaacgcgttttaagactactggtcaacctcccggaggaccacatcatagtcggcaaggataataccaccgtgagcagcagcgttccgccgagaccttctggtattgctgataggcttctcagaccatttgtcgagcacaattgaccgcacctcaattgtatgtgcatcgaacgtccgctcatattttatgagggcttttgggcctcttcgaggtctttttgtgtgtcctcgagatctttttttatatctcggatgttctttccttgggtgtcggcccttttctggagatcttggacagcctgtgacggagtcttaagcgtttccagaagggtcgctcactgttcacccatgcttggtgattgtcgttaaacacgaccgggtctggtgacaatgcttatcgcattattgtaactgagtcttcgctcgtaagccttgtcagagtgtgattagcttggccctaggctaattagcgaatatgatactgttactaaaatgaagcgacttgcctcgggtggaaaagctcgctgcaatgcggggatgggatcgactgctgtactgtgcgagatggcggatgaaacgttggaaaatctcttgaattgcgtagagaggaaaaggaaactatccaggtgctgggactaaatagttgttgggagcggagaggtcacatgacctcgaacagatacaatcgggctgagaggatcacgggtagtggatttgtttattggggatttccgtcctttcttctgacatttcggcattttagctgatttctgactcagattgccattagccgtgtaatcaatgatgtgacgtgggtgtacgataaaaatagctttaagatgtgggtacgtctagttgatgtgagttcatcgtcaatagatgctcgataaaccacaactgactagaatatgattgaactaggtcccgagcgtgaggtaatgccaccgcttctctcgccaggcgaccgaagacaatcatctaagctcggttcgtccttacttcgccctcataccgccaggtctcttatatctaggcatataaaatcttcctccaccatatcgttagcattaactgacgtcgtttcgaccgctatacgaactgagatcaaacggctcgctggagattcataccaggtatgtcagtctacagaccctcagatctgccatatgatcggaaaagaagataagtaggtacgtggtactattactactggttcgaatggagtatagctaaccatatttagataggtaacctttggttaaccgcgagcctaatcgacttccaacttgatatcgggacttaagtaagatactgttggttagcatgcgataatagtaaattgcgttgatttagtgaaattaacagcatgaaaaatatcatgaatgaacataatctttatctaccagatccagtgtggttatatttactagtaggttttatccgaaatacaaaggtctgaagaaccccggtgcaatctcatacattgtttcattcgctcaaagcttagacttcttgccagtcacgttgggtacatcatccccggagagcaagaagtccggataagacaaactcccaccggaagcaccgcctgcagacatgcgccagtttgcaccatcgactgtttatgtgtcagttcgcaacattcataatgtccttttgttatttgacaactcaccgacaagtgtttgaccagtgacatagctaccagtgtctgaaaagagatacacggtggcatcagcaatgtcgcggacatgaccaaagcggccgagtggctgggccttggtgtaggcctccagggcatctgatggcagcagacgttccaagccctagtgaatggtaagtcaatcaatttttgacacagtaatggcactgttgagacttatactaacctcggtctgtgcaatagggcccggcgcaatgatgttcgacgtcattccccgaggaccatattcgatggcaacactgtgcgacaacgcatcgataccggccttggcaacggatacatgcgtctggaaaggcataccccgatagtgaatggtagcactgacgaagataattcttccgccagttccaatcggtgatggttgaactggggggttgtcagtgccaatggttaacatatggtgggattcactggacggtgccctcacgagtctttgtatccattctgtgcttggttgccgactcccttagatacggaagagttgccttgagggtattgtaagagcccaagacatcaatattcatgactgacttgaaagcattgaccgagagttgctcgatggaggcgaggaagttaccagcggctccagcactgtcagatactatcagtatgagaatcgaagacacggtcaagttaatatatcgacgtacatgacaaaatcaatgcctccaagttccttgacacaacgctcaactgctttctgcaaatcctcgaacttgcgcacgtccacggaaccgatcccaatcaccttggcaccgggtcggactgtcgcgatgtccttagcgacgcgctcggtcttctctacattgcggccaatgatgcaggcgttggcaccgaggtgtactaaggcccggacttgggcactgcagatagtgccggcgccacctgtgcagaagacgactttgtttgctgggtaagggagttagtgtgggttgtgcggtagcgatggattcggagagcctaccgaagatcccatccttccaggaatcactcaaatattccgtcttgggcagcggcattcttgttactatgtatgtccctggataaattagtttaaagattgtgggggagttgggggaatgttcaggaggtgatttggtgatacccgtttccccacagttacctcggcttcacagttttatgcataaaagattagtgatacaaaaatacaaagctctacaagaattgttgtttaaaccgaagcagttgacaccttgcttgatgaaatgtatgctgagaagacatatttagttcacattccgtgtacatatcttgtctgcctcatcctctagagattcaaggcgcttcatagacagaaatggcacatttccgtgcattgcattgttagtcagcagccacgtgccgtgatgatataagatttaagattcagcctccatctttcagcatcacactagttatggtatagagatgaagttgacgtagtggatgaataatgaacgtgacgattgattgcataattagtgagtactcccccgtcttcgatattcttcttatcacctcattgattatatactttgtcctctactgtccggctgcatccgagatacatgagcatggtataccctagcgaaccaattgtttcaccgttggttggctcaccatttatgcctgtaccacagcaaaataaacagttgtgataattaattgacagtatccagtatataatttatttcctatactagaaggagttccaagtggcagaggttagcttatgtaggagtagacgtcgatctacatctaatatacgactgcctagatagcctagatagaatcttatataaaaaaaagtaaacgctagacaagacttatatcttcactgctttttactgtaataacaacatatagattgccctcattgcgatgaagaacaaccgttctctgattggctgtcacgtaggcggaccgcgacgtcaccgaaaaagaaccacctcttatttgcattgttgacgtgaatcatcgactcgactcgactcatttcagattctgttatatttgccaaatacagctctgagccaagcaattgcctttgttttctgcagtatggcatgccccatcagcgttagcaagtttgttggcactgtctccctcggtcttcttaccgtacgtcaatttcatctatcgcatcataaatacgctctacaaagactaacaacatgtttcgaatctacagggcctctcttactccacatcagccatcacaatcccagctctgcagctccttccaacagcgacaaccgccgcccgctctctgaacgaagtgaagcgcctaacccgccgatatgccctccggctctccttcttgaccaatacctgcttctgtttcgcatggtgcctctcatctccacgccgccgacacccatatatgatttggctatgtgcattctctacaatcggggcccacggtgttgatttctggttccaccgtcacctcggcttcaaaaactgggtgtcggctgtgatccgcgatgtttcccacttctctctgatccgggactcaaatacaagcaaggatgaagaccttgttgtggttgaggccgaggacgacgtgaacggcgaaaccgttcagcgcgagatggaccgggagcgccggctcaaccaagcgcgcacttggttgtctggtattgcactttcgatcggcattgttggtctttggggtgacaagaggtgatttttcttctctttcttctggccacgatggtctttcctcatgatgaacactagttgtggttccatatctattttctaggaaacccctttcgttactgtttctttgatcacgtctaatctgttttacgcctgatacctttcgttccgcccctcttttctcttgcgtatcttttctgtacatcgatgggaaccgctaggaatggagtatcttctgaacttgaattcggcgtatctgagccatatctacagaatcgctaatccgaccacccaagctaaagcctatcatctctcatatgagcctcaacttgactaaaattcgtgggaagttcaaagggagggagaggctgatatggaaattgacattacaatttctttatacaacaatgtaaaatgcagatcggcataagtgaatgtcaagacaatcactccatatagacaaacaagtattacgatctcaagtagatggcgctagactcacatgcaaatcatccttatcctccctttcttaatagtacctaaatccctagataactaaatatttatagccatagtaggcaagtcgaaagtgaacgataaataacagtaatatttgactgtggggcacgcagataacatgtccagaaatataggagataggaagaagaaataagcacagaacataaagtgaacagagtgaaaccagagtgaaaccagagtgaaaccagagtgagggcatgatgagggtaaagtgagagtcaaaggagccgttctcacattaatatatacgttgtacttaggaggggtatattagggtcatattgttataggagcataatgcagcgagatagattatagctaaagagtactaatatcaactctaatttttctaattacgaactacgtatagctataaataccgtcttctccctttcttctttctcttctcttctctcttcctacaatcccctccgtctctgcaacatcttcgccaactggtgctatatactagtaccgtctgtgaactcatatccttcttacttaccactcgtactctactaacatacatgggtataaatagtcacttcttcccttctaccttccacctttcttcttccaccctccatcttccatcttccagtttttgccctccaacatgacgactgaacgtggcaaaccccagtttgtcaggtatctattaacctggatgtggagggtaagaaaaaggccctccaagactgcaaggaaaagctagcgaaggactcgaaagccagaaaccaggctcccacgggcaggcattcgacccccacccgcagcagctcgacaagggaaaagaacgtggcccgagatcgctcccccttgaggatcgcgaatgtgatgaccttagccccgatgtctatgattctactggtattccctctctccgtccgcgaatcgtccctcgatcgattcgctggggaccgtgacacgctaacttccgctcgcgccgggacgatactagatcattgacgagtcaaaaaccatcacgggctaggtcacacatggatacggccacgggacaagagcttgctgggacgttgcaggcagaggtgtgcgacaaaatagtagcggtgcaagaagcatcagctactacccccactatcgctccccagcaagtggagatcaatgaccttagccccgacgttgatgattcccccagcattccttctatcccgaatcgtccctcgatcgattcgccgaggatggtcacgatacactagctcccgtgtgtgccgtgaggatgttatatcattggacagtcacaaatcatctacaaatatatttgatcactagttacatactccgtaattatgccatgtacccctattgtctgactagctatgattaatatcgattagcaagaatatccagggacctagaactaaatcagggcttaagagtcatagccagaccaatgatctgaagaaataaaattaatcccaatacgctaaggagaatggcggagtcgtcggaaatgagccccttggcgcaaaaagaataaaaaggacatggcagtgcagcttgtgttgctgtgaaatagaaaataaattcagatcaaatctataagcttgagaatcatgggcaacttcaccatcgtcaaaaggccaaatctacacgccaggcttggcaatcgtcgatgcgccacaacccaacacgcccctcggaggaggcaagtcaatccgccaaaaatctatcaactcctaactaatttcttagacaacctgcaagtcgcaatcgacgtgtccggcaatggccaattaccatggccggcatcaactcaacccgactcatcgacccacttccacaacatcacactctttttaacatccgagtcgcacaactttaccatctctaacggcacaaagcccgcgtctaacacaagctatatcggtcccattttggacctggagccctcatccacagtcaaacatgtgaattggatttggcccgaatgcctcgtgggagacggctctggctcaaaggactcggcgcgcggggcatacaatatctctatgcaccaatctttccgctggaatgggaccgattattatactctctttgacctgccgatctctgtcaccaacagtatacccaagagtgacgatcggatcgactgcgatctactggaaaacaagcttcttagcgcgacggagatcggcgagagctcggattcgctacctgggcagccgtggattgagggcagagttagcacgacagtatcgagccccgaggcgactcagacagggtcgggtaatcggtgtcattcgggattcaggagaatagctggcattgcgattgccgcgacggctattttacatttcttggtttgaggttcctggatatcatcgggttcatctctattaattatcaattttagcattgtttttgtctttatatcagtacagaaacaaccggcttacttccacgtgcgaccaactatagtgtagattcaaatatggctgtcacaattcgtctattaccgaccaccgaattctactccttctgttcatgatcgtcgtcggtatttctgctttcggaagtatacattctcatgttgattttggaccttggggatatcccttgattgcctagctctctctcccagcaaagtttaatatctccgatcaagggttccttccacatctctagtcaagtatgtcaagaagattagatcgcgcacaccggaattgacaccaacattgacaccaatcttctttccatgccgattttgtccgcctcccgacgagtcctccggtaccgcatcgcccgagccctgctcataatcttcgcaatatggaatcttgccgagatacatctgattcaacaccgaattcacgaagtagatcacgctatcccccgacaccggccgcaaaagcaagaacgaatatatattgcaagcatcaattggaacaatgagctcgtattacgcagtcactggatcaaggcactcacacagctggtcatgaggcttggtccggaaaatgtattcatcagcatctacgaaagcgggagctatgataacacgaaaggcgcgttgagagaactagattgggaactcgagcggatgcgggtaccacgaaatatcactttgtcgcctgtcacacatgaagatgaactagccgcaccggcgaggggtgagggctggattcacacttccaatgggaagaaacaactcagacgagtgccgtatctggcgcggacacggaacttaagcttgctgcctctgcgagatctcgcacgacagggtatcacatttgataaagttctgtttctgaatgatgttgtcttcacggttcgtttcaatcgtcctatcttctgtggaatgtttattctaatgaaagccctcttctgtgattagccgaacgacgttcttgaactcctatatactaataacggcgaatacggcgctgcttgctcgttggatttctctaagcctccgaattattatgacacatttgctctccgggatagcgagggccatgaacccatcatgcagacatggccctatttcagctctgcggtatcgcgacacgccgtgaaaaaattgtctcctgttcctgtaacgagttgttggaatggcatgggtgtgtggacctccactctaggagagttgcatgagctaacgtatatctagtggcaatgcccgcaagtccattcatcgacagcccaccacttcgtttccgaggcatccctgattcactggcgagctatcatcttgaaggctcggaatgctgtctcattcatacagacaacccactatcagtggaaatgggtgtttatttgaaccctttggtgagggttgggtatagcggtgccgcatatacagctatgcatccggtgatgaactggctctctgcgaaagcgattctacaagggttgtgggtcaatcgactgcgccgtttgggtgtcacttcatggctgaaagaagaagtagttcgaaggcggttgaacgcctggagagctttgagtactaggaatgaagaacgtggggagatttgcatcatcaatgagatgcaaattctgcatcgatacgggtgggcccatgtgtgaagtagagccagtggcacatcgcttgtatatatcatttagtctcatgctgccgtcctaggactatagccaggcgcttataatatgctttatatcttcacctcgcgtgaaatatatacttcgggaataaaaagaaaaaatacacagttttaagattaagttctgcagcagcttgatctacgatgcatatagatcggctactgatattcaatcgcactccatgaatatattgtacaccatcaggaaaatacgaacctcagcatccaatgcattcgactttagcctaatcttcaattcccgtcttttcccaattaattttttacacccccgaggccggcgcaaagcgagcgattatgtaaccccgagccgcctgggactgtatcaaaagcaaaaacccccacttaccctccataaaccacccaaagccccaataacacataatggcaacaatccaaatcctagacggaggccttgggacctccctaggcgatctatacaacatcaaattcgactcgacaacaaccccactctgggcctcacacctgctagtgagcgacccagcaacgctgcaagcatgccaacgcgacttcggcgttgccggagtagacgttcttctaacagccacctaccaagtctccactgaaggatttgcgcggaccaaaaccgcccaattcccagacgggattccgcgcagcgcagtagggcccttcctacagaaagccgtggacatcgccgagcaagcgaaggtgcgcgagaacgccagtgtcgcgctcagccttggcccttacggcgcgtgcatggtccccggccaggagtatagcggtgcctacgacgccgcgcatgactccgaggagtcgttgtatttgtggcacttggatcggctgcggatgtttgctgaggcagagggggagcttgtgtcgcgcgtgcggtatgttgcatttgagacattgccgcggcttgatgagattcgtgctgtgagaagggcgattcaggattctgctttcgatgtgccgttttggatttcttgtgttttcccgcgcgaggatgatctcttgccggatgggagttcggtggggcaggttgtgcgcgctgcgattgcgcctttggagggtggggctgttccttgggggattgggattaattgtactaagatgcataagctggctgggcttgttgatttgtttgggcgcgctgttgcggagtgtgttgcggacgggcaggtatctgatgtgccgagtttggttttgtatcctgatgggacgaatggggaggtgtacaatactacgacgcaggtttgggagagacctgatggattgcgtgatagtgtgagtgctgacgtgagtactactctcgggagtcgggtgggaagattgtggattatgctgacgtgaatttagcgatcttgggaggtgcagttggcccaggtggtcaatgaagcctacgaaaagggctatttcaattcgttccttgtgggtgggtgttgcaaagcttctcaccacgatatcaagaaacttggagagcaattcaagactcaatagggattatgatcacgttacgagtgaagtttggaatgaaagctgaatagaataagacattataaatcggtcatgttgaattgccggctctatatggggatatttatacattatacaagtcatttaaaagagccaatcggtaaacttcgtcaacgcattgcgattggggttttcaacatgcgtgatctccccatctacaagacggcccgaccataggtcgatactggcggcacgctcaaactacattcgacatgttagcaactcttcattaagaaatagaaagaataagagggctgaactaaccttggtgcgacgccagatcttccagcaaatgatggggaaaatgaagatagggataccgatgtacgacgcaataaagtccgacgtattccagttgcccttcaagaagacggggaaaccagcaaccaaagtgatgatgatggaaccgatgaagcccacccacgcggcataaggttgcaaaggtgcttgccatgggagtgtgtctcggctcacaccttgtttcttcatcgcagcaaagaaacggatatagcacaagcaaagggttgcccaagcaatcaaaccggcaatggtgctcaggttcaaaagccaggtgaaagcctgtgctgcaccaccggtgccgagactcaggtacgccagcggaccaaagagccaggcggcaaaaacggcatagtatggcacgccagacttgttcacgcgcgcgaagatctggggcagttgcttgtctgtagtcatggcgacaatcatgcgcgatccgacccagcagtatgagttaccggcggaccacgcggcgatgagaatgcatgcatttacgatagagggcagagccttgatgccggcgttagtgatggcaatgacgaagggcgagctgttcgcgtttccggtgccagagacaaggccttgtgctcttggatccacgatcataccgatgagaagtgctccgagaatgtagaagatgccaatgcggtaagtgacacggcgggcggccttggggatggcacggtggggatcaaccgattcggatgcggtaatgacgacagtctcgacgccaatgaagctgaacgaggcgttgaccaacgaagacaggaagcccaggaagtgacctgtcggaccggtgataccgttgtagtctgtccacggtccagggtgatgccagtagcggaatccaatggcgccgcctttgggagcaccacctgcagtaatgacaatggagacaacaaccaagccaaggaaacagaggaccttgacggcacctccgaagacttcggtttcaccatagaatcgcacactcatcaaattgatagccaaaatgagtaccaatccaactgtgatcaccacggcaggcgtgagatccgtccaatatgagacaataaccgcggccgcggagacttctgaggcgatggcgatcgtgtaacagtatccgtatgaaatagcgagggagaaaccaacagccgggtcgatgaatcgagtcgcccagtgagggaaggatccagcagtcgggaaaagcgttgcgagttcggctatactttgcatcacacaccacaagactcctcccacaataatataggcgagcagcaaaccagccgggccagctttggcgtaggccgcaccagttcccacgaataaacctgtgccgataccaccgcagaaaccaatcatggtaacctggtaattgcgcaggcgtcgctgcaggggcgcacgaccaccgacattgagctcaaactcggccttgggattgacatcgtagtcttcaaaatctgcgccgggcgccgactggacgttctcgttgtcgtagccggacttctccatgttgtgtgtagtgccgatcatctaggctaggtctgccttagtagatcttaccccggagacctgaggagtgaccgaaatgcttagatgggagacagcttttttttttccgacttattattcagtctcggtccaagcacgacatcgggacttctattgacgccaaattgttctccacagtggggagactcattggactgcgtcgctcggagttcggcctctccccacttttttaagcggttgactaactttttcttcattttgccataatcgcaattgaaggcaaatcatggctttgatttgttagtctgatatcgcaaagcttggtggcataggccggcatcgtgggagcattgtggcgagtgaatcaggtatttttgcccccaaggtcccgtgaaaaatggatgcatctggaaaccacgtgctctgccggatagatccccgagaatgtaagctttgcgcctgagatatgaggcaaccttgttattcagccttagtcaccaacatcttcaaccttccaggaaccttccaggaaccttccaaggttggaattggacccttttcgtgggacaaacaatactacggatctcggtgttaggcctgaattacggagtaactgattccgatttccgaggccacgtagccgttcttctcctcgacgccctgcctttttctgatcatccgatttgcgtttaccggtataagtgctattggctcattgagaatcgatcgccggtttttgggggcatttgtatgagacttctttgaagaaaccttataaatttcgatccgccggactagaagtgagcttgcatctgtactttgacgaatatgcctttgtacgcgtatagataaagtatctagctcagccagatcattaagaagcttatcattaagcttcttcttaacccgtatgtatgtagtatccggtagcaaattttgattggtgcataaagaacgagctagctatattggaactagtgcattacctggtcacatgacacatatctaagaccttaggatttaatattgcttcgtttcgctccataatgcaagcaaatgcaaataatgaaaatactttcaaagtctaaaagattttatttagttatgtcagttcgacaggaacatgtacaattatttatgcatcaaatatttatgcacaccagggttccccggatattttaccctaaaacaatatcacatgaccctgaaaaggtcgataccacacaagacctcaacttgttggatgagattcgagatcagttttggcgtttgagttaaagtgttacatatgtaaatatcgaaggctagatccattatcaaaccaccaggtttctgtcaggttacaataatatctcgagaaatcttcgtgcaacatatggtgcaatgaatgggtcggtacggagtagggggcaattaaatagcggatcctctacggagtactccgtactacattttgggttttttggcctcgcctctattcaccctattttgtactccgtacggaggatccccttaggttcgttcggcatagtgatgtcgtatgttcgagaatatatggtatggtttgagatgcgaggggaaaaccagcaatgacacttccactcgtcactgtgtcgtatggtcaactttttcagggcccattgccggatcaaccgtgcgataggagtctaagaaattatcgtatggtccactgacagcagcgatatgcaaaggcgaagcgactccgccgaggggtatccttagactagcaccgaccgttaaccactatatcttacagctgcatcctcacaaatcagacattgcaacttctcatccgcaattgagaaccaaatcttcgctaagcccgaccgaatccccgtcctggtctatggcatctgacccgaccaggttaaagcctacctcacaaactctcactttcagtctctccccgtggcggaaagactagccatcgccgaggccgtctctctctggaagggactagagtccggcgattcatacatccccccgcccccaagcgtatctcgagtccgatccctggaattcccaagcaccgcgatagcctcctctgtaccgtcgcgtctaccgatggtgtcgcccgaagcggccagaaagttgccggtctaactagccacgggatacgtactaacatcgtccgcgcgcagcaagaccgactcccgaataaaattctccaggcatatatagacgagggcatccagcgctagacaaggagactggcttgaagtggctgtatgacgggctaactcaaaagtcgagtttgtacaagccatttctacgagacatttcgataattaatgattgaccagtatgctgtccatggactgagcgaccaccgcgaaaattcatggaccgcagctaatgggataaaatagctgcatgatatatgccccacactagaatcatttcctggggttgtagtttacccacggcgagaaacttccatgagccatcatcccagcagaaactatctgagcaactagtctataacttataggaaatgagatcgtcaacgtaactcaactgacctaacaggaaaacaagaattagcaccagcaaagcaaagacaacaagcaaagtgtaagcagatagttcacggctgggtaaggataattctcttacctggtccaattacgatttgttgacaaagtctagtcttccatgaacatgtaaagtccaatctgttggttgattgatgggtagcgctataatataattaccaacgactgtgcttccttataagtatggctggactcttactcaatcctttggcattatctaagtagctttgcagttcaatgagccgtgaatctagctctggtgtccctatgaagatcgctccgcaacttggaagtatgatgctgcgaaggtccgtagtaggggtttcttgtgctgagtcggcataaagcaggacctaattatggtgaatgataactctcttatgtagaatggtgaaacttacgctgctaactatagttcccccgagactatgtgcaataaatataatcggacaattggctgtccgcgttgaacaagacttcatcgtcctcacaggagaagtcgtcacatatttcgatccaagcggagcatagtgatgatcaaggctgatatcattggtgcaacctgggtactcttattagtctcccactcaataatagggctgcatgtccgacctcctttcctctcctgcattacgcatgcctaattcggcagaggcgttcgatagcgccagacgaacctaatattaaacactccatagtcacactcttaatgttaatcggcctatggactgaaacaagctgcctatgccaagacttccatttcgtccggatcgcggacgtccgcgcccacacactgccaagcgccaagtttccatcataattcccagcataagagctaatgcaggattcaatgccgatccacgtcggccatcacatgggagaatctcaatgttaagcttggaaacagtttattattaaacattccgatcaataacgccgatcattcgttgtcttccgtcttgggacggggtaaaattctattcagctgtcccctcattctctcccctttcattgcaaggaatgcccaattactatatctatcccttgacaattttaccttcattctcccaataatcttatctgcttgcatgttcatggaatgactgatatcgaactctcccagcgagatgccctggaggacgagtccccgctcacctccaacggtgaggggtcttctgcgcccgtgaagccagcgcaggctccaaaggccggcaggaagctgccaggatggctggatcacttcaatgcccgcgatatgaaggtgctgttccgttgcacgttggctgcatgggtcgcgtcgcttttgatcgtgatcactccgtccttaagcgtcattggtactgcgactttctttgcaacgtgagcgcatctatattttactctcggtatcaattgctaatcctatcgcgatcagtctagtactctttatggtgcctccgaccggcattgttttcattttccttttaggaactctgaccgttatcattggtatggctttgggctgggcctggggtgtcatcactatgaaggctgcgatggcagcgagaccagcagccgagacccaggccaaccttcaatccctaggacaggccgcatacagccaggccaattccaccggacaggccgtggcagaagtccagaaggagcttatctataacggctggatgcttgacgctcgtgtaacagttgtctactattgcctaatctgtctgttcatctatttaatcgtgagagacttcttgacccgtgcataatgatcgcgacactgaccctttcgcgcagtcccgtcttcgggctaagaaccccaaactcattctgttacagattctcggaatcatcatcatcgatgttactctgactattggcccgatgcttccatatttcagcggtactgtccctaaggtcttgatcgagcctgccgctattggaattgggttgggcctggtctcccattttatcttcttccctcgatctacctcccacgtcgtgcttgatggcatggaggggctggtgcggttactcaaagggcctgtggacgtcacggagaacactcttctgaaaggccaagtcttggatatggcagatcttcaaagaatcaaagggcaaaccattgctgcttacaggaatctcaagccggccatggcctttctgccgttggacttctctgtcggttggtggggtgctgacgacatcaaaagcatgaagaaaccaattcgccaggctttggtgagtagtctgtctcttcttgaagttcacatcgcccgcatcggcggagaagccaagttcaaaaagctgcaccagctcaccgtggatcgagactccgactctgattcccaagcgaatggaaatgagaaaaaacgcccacgcgaggttggcatgcgccaaatgatggagggtgttaatttggtacaagcaatgcgaagcccggaacatgaatctatgctatcggaaactgtcgaggtattgcgcaagtccagcaaggatatcctcccggcgtgtcaggaagctgttgagatcattgcagaatccattaacacggccaacaagcgttggttcggtcgcccttccaaagaacgtctcaatcagttgcacgagcgcagtcagactgtacttcagaatcttcaggccctgcgcacatcgttcgcgtcggaaaccaccgaccgtctgattcaaacacatgcggagattttcgatgaaaaaggcatgctcaaggcccttgacaaaacttcaatgcccagagttaggggtatcatgatggggatggtcttcgaagagcaggtgctcggcgtcgctgacgggtgggagcgggtcctgcgacaacttgtcgtcctcctaaaggaacgtcagaagatccgtctgtggctacccaagggcttgcgatacgcactcaactgggtatgtcgtaaaaatgccgtggcgcctatacccgcggctgatgacccaatcgtcgaccccgatgtcgcagagacgcagtccaaagcggcacagcttcatcttcgcatgagcagagggtatcgtgtccaccgaggtagcagctttgggcgcgctatcatcggcacatatcattggtttatcaaccctgaaggtctttatgcaatgcgcatggtggctgtcaccatcgcgctcgctatccctgctgcgattccccacactgcgggtttctattaccgtgaaaaaggtatctgggctctcatcatggggcagaccacactggttatatacatggccgacttcaccttctcccttatttgtcgagccattggtactgttgttggtggtgtccttggcttagttgtgtggtacatcggctcaggtcacggcaaaggtaacccgtacggtcttgctgccatcatggctgttgcgctcaccattctcatgtgggcacgtatattcacgtcccctgctttccttcaagctacaatcatggctggtgcgacctacattctggttgtcggttacagtttcgaggatacgtaagtaaatggtaccacattggggaagcaacatggctgacaacttcacaggcacatcccaacttacggcaatcccggatggggatatagtgttttctggcgacgacttgtgcttgttcttattggctccgcagcggcactaatcgtgcagctcttccctcgtccgccatctgcgtcgagacacatctgcaagtctctttcaaatgtcatccgctcactgtcggaccactacgcgcttctcttatcctgctggggacaagggcgcgaagagggcctggccgcagagaagctagctctaaatcttgcagagactatcaccgcactggacggtcccatcgccttgctgcgctttgaattttcgagctcgccatttgacagcgatcgtctcggtcaggtcaaagcactttgtcaagaactcaaccagaacattgctcgcctactttacctatctgcttcgctgccggagcacctacagactcgcctcgctcggcaagtcggtctccttgatcatcacaatatcggcgacatcatggctgttctcggtgtggttgaacaatcactcaagacgggtgaccccctacccgagatgctgccaacgccactgctcaaccgttgccacgattactggaagtcgcaccagacagatattatcctgagcaaggagttgatccgcgacgagaactaccgccgattctgcgttgccatcagcgcatacctcaagttcctggctgccgtggatgacctagtgctcgtgatgaagggcacattgggtgagtcgcacatcgtcagccgcgacctgctccacgaaccgaatgtataagagagcaaatttatattgtaattagagtgttctatcaggatcgttgacatatataattgtgcatatagcgatgtgtcatcaaaattggatcccctcacgttcctccgcacggccggttttctccaattttttcttcttcccctaattcccaacccattctacggcctttgctttgaatgaacgtcattcaatattttgtttttttcccttttgatctcctgtatggacgattaccaataattataatattcaattccatctgcgggtctcgtccatggcccctccacgtcttgcccgtcttccccggtggatcagccactggcttggctatcgcccagagcccgtgaagccactctctaaatacgaagtcgctctatggtcgttcataatctcattctgcggtctatcggtcttacaagcaattttcaactactccgactacttcaaagagcgcaatgtaccgggtatagtcgcatcctatgtacgtgtcaatagccaaatcgcattcccaaatatcgacattgactcacataaaaccagggtgcatccgccgtcctcgtcttcggcgcaattgaaagccccctagcgcaaccgcgcgctctagtcttcggccacttcttcagcgccctgaccggcctctgcgttaccaagttgtttagcctcatgccggacaaagcgcggttcgagtccctgcgctggctagccgcttcgctttcaacggctattgctattgtcgtcatgcagttgacgggtactacccacccgcctgctggcgcgactgctctgctcccagctaccaatgcggagatttggcggctttcttggtactacttgcctgtagtcctgttgtcctcgactatgctcttggtgtgcgcgttgctgttgaataatttgcatcgccggtatccggctttctggatcgcgcctacgccgccgaagccggctgcgcctgttgctccagtggcgccggcgctggcgcctgttgacgtttcgtcggaagaggagaagtcggtgaagagtcctgtatgatgctttaaagagcttctaatacactctggtaatggttgcacggcatatgccgctatctgtttcaaggatgcgagatatatatgatgtatataaaaactcggttgcactactaacatatccgagactacgtaaggaaaagaaattcaacatgactctttcagggtctaacatacctattaactgtattcacaatctcccaagagctactacgtagcaagcccctacctagggctcttcaatattcactcagtttacgactctcgttaggtctgattgcattaggggaagcagcttcgtctctctgtcttctatgtttgggtgcatttatccaattacttgcgtattgatttaggaaaaattttgagaggctactgtgtgggacaagggagagttgacaaggctgtgccaagggtttagctcttgaggtctcttccttactcttttcgtcttacttgattaacactacgtttctacaatttggacataatcaaggaacagctcatggttctatttgactcaactagaaatttaggcaccgcagaaaacagagaaagttgctacaaagcagagaagcaggcaggtatggacactgtcaaaacaaaacagaaatcccgcagaaataagcccccaggcttaatcctcctcgctgctggacgaagtcgtggacgaatagtattcctcctcaggcaaatctggaaggggaggagaaggggtaggttcctcggtaggcaggtagaaatcgcagcactgtcggcatgggcagtcatgcaccttgtagtacaatcgggcccaaatcattcgaagatagttgcgtctttcgtcatcttcttcgaaaagcttgagctcccatcgacgctgctcacgctcaaccatcttggcactctccactgcttcggtgtcctcatcgctcaatccatgcagagtgagacttccaacttgcatagacagcatgccgaacagcttcatgagcaccggatcctcgatggtggtcattagatcggcgttagtagaaagaataacccgtacgctgtcagatatctcttcaatcaagaccatgaggttattgcacctctcttcgaagcaattgccctccttctcggagccttcccgaatcaatgtccacatagacaatgtgtagaagattttgcggaggtaggtttggatttgagggacccatctgcctcctgtctgtccctcggaaagtttgttgagctccacgacgaagccatcgcggttttcctggaagttctcaatggcggcagctttgacgtcggcctgcattatgatgataacagttagagatgaggatgatgtaagctggagatgatagttattgaagatgatggtagtgaagatgcatacctcgagtcgtgggggaattccttttgtactcgagcaatagatcttgtctggcatagcagatttatcggagtacaaagagacaatgggccaagacatgacaatagatctatagagaccctcagccaaaggaataaagcctttggcttcgagatatgagtctcattcaaagcaggatgtgtcattcttttcctttataagcgcgaagaatagacttgaatatatgagccctatacaaaccagaaggggaactcaatcatgacagaattgcggtcgacgaatctatcaaatagaaaaagggggaaattatattagagaccgctgactgtgcatgatactcttagctttagagatatatagctgaagatagaaaaggtcttaggcaatcaatgaatgtaaaagttgtgctatattcaaggtatttatagggttgtagggttgtatgtgatcaaaggagtttgtgtgcgcccgtactctttctcccctttctttgtgcaccactcaaaatagcaatcaaagttgttttgcagacaaactaatatcaaactctcaaaggtccagatatcctgacaaagggcagtcaagtcgggtctttggggacgtttcaacaagaacgtgattgttcggcgcataacaagttcagatttctatgcaaaagaaggctggagttttccacaagctcggtcggctaatctctctttcatgagcacttcatagacatgcgatgcccacgcacagcaaaccttgcgcgtatccttcgggtcgatgatttcctctattccaaatgcgttcgctgttcgcaccgggttcatcagccgcaaatactcttcttccaactcttgataccgttcttccttctttccaaccttctcggcttcacgcagctcatgccgatggccaacttcaattccgccgtccaggggcagcgagccccactgtccagacggccaagcaacctgcataaccggatcacgacaacccaacataataccgcccgctacgccaaacacacgccgcgttaccacgttgaataccggcacggtggtactaaagtaagccttggcgagctcgacgccccaacgcatcgtggctgtgcgctcggcaaccgttccaatagcatagcccgcttcaagaaaacgcgtcagcttgtttcaaaggatgtaggatgaaacaaatcacttacggatgtccaaaaactgcagaataggcagattcatcacatcacacaacttcagcagccgcgttaacttctggctaccagcggcatccagtgcgcctccgttcacttcacagttgacggagataaccccaataggacgaccacctaggcgcgcaagtccaccaattgcagtacgcccccataatgcgccaatctcaaaccaggagtctttatcaactacagaggtgatgatcgaacgagcattatacatgcgtgcttgtcttcgagggatgatactccgcagtgcaacatcttcgcgctcctccaagtcagtgcagggaatagttggtggtgcatcgctcccactgttggggagatagctcagaacgacccgcagctgctcatagcactctgcctcattggcggcaaggttatcgatcgtgccgttcgtacaatgaaccataggcccgcccaggtcttggaactcgagaccttcttcgaatgtggcaccttcaacaaccttcgggcctgcattgaacaatgctccgatgtcggctgccatcactgaaaagtggcaggataccactcttgcagcgccaagcccaatctacaataaaagttagttcagctcatatcaacaaatgtcaaatggtatgtcagataaagcaaaagagaatatcacgaaactcaccgcaggtccaacaacagcccccaaattcggaatccccatattcaactgcttaataacatacggaaaagacgcaacatgagggagataactccacccttccttctgaataatcgtcacgctcccaccgccagaactcccatcaacaagcttaacaaccggcatacgcagcgcaatagcaagcttctctacataaaccgtctttccggtactcgcgccgtccgcatgtccagaccggatactgaaatcatcagccgtgaggaggaccttcctgccgcgaagcagtccagccccttggatgttattactaggcacgaaggagacaggcttctcgcgcatcggcgcggtcttttgccacgtcaccgtgccggaaacggacccgatttcttggaaggtgtttgggtcaaggagttgctcgatgcgctcgcgcacccatagcttgcctgcttgcttttggcgcacgtagcctcggttggtggggtctggctttgcggctattgcgcggagggctgcgagttgacctaggacatctgagtggtctgctgggaggtgggtttctgtggactttggttttggcttggactttcttggttgttctggtggggatatatgggatgagacctgttgtaggcggtccgtggcttggtctttgccagttctcgttgatgggctgtcgttgtcttttgtcatagtgtgtcgattgatacaggatgttgtttttattattattattgtgtagaatcggatacatctcttgtttaaggatttggtctactgaggggctaggcagaccttccgagggccgaggtcacccacgagagctataatatcttctcgaaggaagtacctggtaatgagatattttaagatacttcgattgatctatttgacctatttgaaacatattataactgatttcgttatttgatttacttgggagggacttttgcatacaattaccccggatttccccttccaccccgatgtcatccccgcactcacggcccatcaagagattgttggtcgccaacaggtatgaacttctaaaaaaagttaatgttatattatactcatgtaatatataatagaggagagatcgccgttcgtattctccatgcagcacgagagttaccctcgtcagtcgagacattcgctctctacacatcagacgaccgaccgcattgcgatctaggacgaccacagcatgcaattgaaatcccatcagcatcatcatatctcgacatttcattattggtcgacctggtccaaaaaaactctattgatgccgtgcatcccgggtatggattcctcagcgagagcgccgaattcgcgcatcgcatgtggcacgaagccggggctctcgtcataggacctggatgggaaaacctcgcccggacgggtgataagctgcaggcaaaacagctagcacagcaatgcggtgtccctgtattagaagccatgagtcaacctaccaccaacgtggacgaagcacgtgcgtttgctacgcaggttggtttcccggttatgatcaaggctgttgatggaggaggcggccgcgggattcggctcgttcgcgaggagcatgagctggataatagtattcagagagcgattggcgagtcgccgtctcggactgtctttgttgagaaagctgctgtggacgggtttcatcatattgaaattcagattattggtgatgggacaggccaggtgcgacatttgtgggaaagagattgcagtgctcagcggcggtttcagaaggtggttgaatgcgccccggctttgatgcgggatagagctttggtcggtcgagtgatcgagtctgcgctcaggatggcaagtgaaatccgctatcaatcattaggaacctttgagttcctggtcagtgaacaacgcggggaattctactttttggaggtgaacccgcgtctgcaagtcgagcacaccattacggaatctatcagtgggatagacctggtgcagacgcagcttcttctcgcccagggatacactttacgtgatctgggcctcggcgctgaaattgacccaagtcatcttccgccaaatgccttttcaatccaacttagactgtgtgctgaagacccgagcaacgggttttctctgagcattggcaaagtgactaggtttaccgtgcctagtggcaatggaatccgggtagatacacatgtcaatgtctctgggcccgcactagttgtgggatccaacttcgacaatctgttagccaagataatcgtgactgcgcccacctgggaagcgtccgttagaaaagcccagcgagtcttggctgattcaagggttgacggtctgaagactaatatcagccttctacgagggatcgtggcccattccgatttcatggccggcaaagtcgacacgcaatggcttggactcaacatcgacgcagtactccagcaaggggagatgatatcgaagactattcagggactagatggttcagccggcccttcacagcaagtcagccagaatggactaccagtatctaatcttttgttccgaaaaggagatgcatggtcaatcacgttggaacctctgtcgaaggattcccaatcagacaaagtttcccaccatctgcgcctgtcccgggtactacgcaatgagttcccgactgcattggctgccgaaattgaatatacgactccaacttcggagggcgcaatcccctatcggatgcagctcgaaacaaccacgactgctgcgtcagcattggtgtcctcgtctcatcggcgaggtgatccaaagaatccccatcatattatacttcctctgtcaggcaaattgattgagatcctggtgtcggatggacaggatgtggttgaaaaccaggtcctagctttcgtcaagcagatgaagatggagctcgaagtacgaagccctcgaagtggtcgggtcaaatgggttcatgagatggaagacgaagaggaggatgttgccgagggcatgcttttggtcgagttggagccgaacaatggcaaagtggaagtccggggcaagttgtgattgtaggatataggatagcatctactgagtccctatacagatcaaattcgcgagtcctggttataaccaacgaatcagcttgcagatccacttggttcctcagcatcattggtctagtggtagaattcgtcgttgccatcgacgaggcccgtgttcgattcacggatgatgcacaagaatttatttttgctttttggctctggaatcggttactgaactcaataaagtatgatcgctttttggacgatgataagatgagtttggtatttactttttgcaaatcaaggcaggcggtcaatatgagcggtcacttccccaggtgacgtcaccgcctcggtcttcccatcctcttcctcttcctcttgtctctggcttgacccagggtgtttttcagtatggatgatcttaatctctatgtgctgacatttaactgtgcaagaaacattgtcgatgtcgacgtgttcgcggaccactttttcgacgcactccccgcgtctggtgcggggagctccgcacccgacctgattttcctctcgctacaagagatcgcacccattgcctactcgtttctcggaggatcctacctttcaccctacttcgatggattccgccgtgccgtccagaaagcctcggcacaaaaatggagccaccactatgtgaacttccttacggaaaatacgggaatgacaggcctgatgcttttcgcgcgcgaggacaccctggccaagatcgcctggagtgacaccgcccacgtcggcttcggggttcaggaaatgggaaacaagggtgctgttggggcacgcctgggatatgttgtcgaaggactcccatccaagaccgtggacctcactttcgtggcagcccatctcgcccccatggaggacttatatgagcaaaggaacatggattggaaaagcatagttgagcgccttgtgttcacgcacgacaccaagagaccggcagagggttcaactgcgaatgaaaataccggccttctcgacgacgctgcaacggcccacgcggagggcagtcgcagggatctcttcgcgcccaacgcctacctattccttgccggagatctcaactaccgcacgtcgaatgtcggaccctcaattcgagagatcgaacatttccctcggcgcaatgtcgacattgataacccgtcgcactattcgcaccttctgaagaacgaccagctcgtgcgcgagatgagctacggcaggaccttccacagcctgtccgaagcgcctatccacttccctcccacgtacaaatactcggacgccgcgcgcgaagctgtccgccggggcttggacaccgacgagcttgaatggaactggtcgactcaccgctggcctagctggtgcgatcgagtcctttaccttgataagccctcgtgggttggtgaggccggaaaggtcaaaccgctcgcttacaacgcactgcctctcttcgcacagtcggatcatcgtcccgtggcgctcgttgtatcggtgccgctactgccctctaacgaatcctcggacaccgagaacatccgagctgtggctccattctctattgatccgagttggaaatccaagcgagacgcggcgcgacgaaaggagattgcggtgggtgcagttgcgtatctgggactaaccagggaaggaaatgggctgctgctcgcgtcgttgctcggtgtcatcggagcgtggttcatccttcgatctatgctggaggtttgagtgacggtatggtgaacggcgctttctcgggactctatttttcctttcttttttcccctctcttaggtattttcatacgaatatcatgcaatgctgcccatcgcccgaaccggcgctggatgaaaagccatgtccctttcgctccgcatagtctccatagttccaaggtttgtaatccgggtgtattccgaggtcgtcagcagcctcaattggatgtctcgtgacgggaaaaacaccccgcattcctcgaatcgatcccatcaagtccgtcagataaactcaagggcccagctcaccggccgcagtcccaattatgtaccatcagacaaggcggcccgtcggtgatttcttagcaacaacctaaactaggaaattactcttttgggcccaagtcacatgaaccgagccgacccgaaacggtcgggatgcgttctgcaagtgtgaaagatggcgctaaggactgaggggcaccgtggcttggattctagacaagcggatgaggtcatgttggggttggtatactccgattatcgctcgtccatttcttgcttatgcgcgaggttcccatgatttggatgggctgggattgtaccctgcaggtactgcatagcctctctcttcgatgtctctggggtctttgtctccctctctcggatactgccgtggctgtcattagtaaggtttccactcttgacctaactctgtaggcacttgggcacctccgtcttccacattgtcacaccggggacttcttttttttttctttgggctgtgtggtctagatgcggagggagtcgtctactgcttttactccaaatgttgccatgtatgttcctcaactgcggaccactattctttgacggtccgcgacatccgggctgcagttgtcctgaaaatactactggctgttatgtaccgggctcttctatacatcccacgtcgtaaaccggtagtagtaaccccgaccattaagaaacgtgcgataacgcatggaacaggccacatgatcgggtcaagtgacccagtgagcttaatttcctgcttctccaaccccaaggctttcaccgcgtgtacaacttacgaaagcccttcaggcatgagaggcggtgtgtccacaacgtgtatagagatcaagacccccggacttctggaatgcaccgcactggatgtgatagcaagccctgcatttggggcggaaatcatctcattttcttacattggagtgtgtctctgggcacaaaaaaaaaaaagaaaagaaaagaaaaagatgggaagaaaaagacggaaagaaaatccccgcccggactccacagcctccacagggatgaaagggagaaaccatacaaatatactccgtccgacccaagtcaaagggctattgaattggattgttatagtgagattcaaagactggaatgtcggccggtcattggcgtgtactgaaatatgagataacgatcatccttagagtacctcccgtactccgtagttgaataggggttggatatactccagtgccaataaacgcaaacagaaattgggcagcaaaaaaaaaaaaaaaaacatgtcattgacagggcagatcaggagaaagtggacagcacagaaggatcggaatgttccatgcaaacttacaaacaggcctgaaggggataaccgaccaaatcccctgagttcggtggagattttcttttccagaacaaaaccagaacgacggcggagtccatagggagagggcccaagagcctaagacccagcattgggaatcggagggggcatcaatttgaaacggcgtctatactgaagacacaactagaagcaatcaaaagaaagtcaaaacgtaatctcccagtacaacatacaacatatatacctcgacggagtacgtacgtcgatacatattaagttccttcatctgttctgaagcttaaaggtttgtttgcattaggctgttgtttcaaaaatctgccctgtcaggtgctccacctgtccctgcaatatacatatgagactgcgagtcatcccgcgattttctgatgcatcgtatcgtcattttgtttttcgatgtatggtggatccttcattggcccccttcatgcaccgaagaccagcattgagccgatcaacccgcatgctcagatcaagggatcaggatcgaccgatctctgcattttagaatctattaaatatgtagcaggtgggataggcctctcacacgccggccctgcggaatggcaggggatcgaatgccacctagggcttggtaatcaaagacggagatgggttagagagagattaacggaataatataaaagggaataatataaaacagtcaatacacgacgtacaaataataaaagacaatatttagaaagaaataataaaataaaaacataaaaaataaaaaacccaaccccagtaaacgaaaatgggaaccctaaaaattctaatccttccttatttaactgcctggaacttggatttgttgcattgttttacttctaagccatctttttgagcctctaatataaagtcatcttctcgatcctctctgtcttcaaatctggtcttctcctctgattgtggctgaatctctatccaacgcaaccttgaaccgccgacgtcatcgtgttgtactacacattctaggccttggtccttattctccgttacatttaatcagtgaccaagacactttttctcttctgtccaaactctcgaagcatccaactcaacgtccttggtcgatcccacattcgatcccaacaaccccggtccaatatcatcaaccatgtactcttgcgcaaactatccccgcgggtgccgaggccgtgtcaaccgacaaggagcaaagtgctctgactgcgtggtatgtgccaaatgatatctgtgtctggtctatgcaaagatcaacgaaagacaaaggaaaacaatccaaactaaccctataccagtctctaaacttgcgccgtccagcttcgccgttcgcccaaccacgcgagtacaagcgcgcacttccctcggaactctttggcgagctctctaaactctccgagcccaagctgcaatgaatgcgaagctcatacatccgggacggtccgaagaacgcctcagcttctagctaggttgcatatcctgccggctgggatgcaccgcgcatgttcgacggccgcttcctttgttctttcttatttgctctccacgtctctcatctgcatcgccgggagtttctttgttatattcggccgtctgcctctactttgatgcctaattgcccggttttctctttgatctcgtctggactctccccacattggctgggctaatgagtgagctctcacgaatatctcctggaaactggagaaccgggcgtggacttcgcgaagatttccactttcactcgcttgggtttgtttcgaggacaaagaacggcccacttttcttttttttttttttgcatggaggatagatcgcttcattttgtttttgcatggatacctacggatatggatctgccactggagggcagtggcgctgatggattgggttctttcaactctccggttgatcgttgatcgctcccttcttttccttgcgcatacgtgtgctttctgctttttatgcccgattttttatgttcttttaactgatgttgactcttttctttgtaaacggtgatgccatacccctctgttttactgctttcatatgaccattcccctagtgctatatacctatttacagcattcatactattatgtcttgacatctatctcttctcgaatatctctctaaacaaatgtacattgtagactcgggcctgaccgcaagattacgtctgtcaacccaacacttgacacccaatcctgacaacgtatcaggtctacatgtacattaccctgagccgcagttccggggctatcaagttctgggcccaaacccaagcctctctctctaacctgtcgcggggacccgacatccggatgatcctcttccctgacatttctcagccgcaacgaatcctccgtctcacatagaaaaccaacatagcccaaaagaaaatccatccaagtctagaatctcgctcctgcactcatcccgtccaactctcggctcaccaactcacacgggaagcgtccttcatcagcccatccattcccctcgtgtcccatcacatcatccccccgaatccgctgcgcaatcccgagtccaacccttgtagcagttacaagatccccgtcacgatctagacctcgctggcccgaatctacagatctgcgcaaagagatgcgcgggtggcatgttttgttcccctcgcccggccagtggccaggggctatgttgcacgcgagattgcgggatacgggatacgggttacgggttacgggttacgggttgcggttacggggttaggcaataatggcatttgtgcgaggctccgtacgacctgcgccgtcgatcgttcgggttgctgtcgatggctcatgtcatgcaggggctagctatccctgtccctgtctgtctatggtgggcgcacacatacctctaacgcaccagctcttgcgggtggtatgtatctgactgacgccgttgcggcccgcggctttggtgatatgactaagttctacactcggccgtaactattggtctggtttttggctttttggcttttttttaccggcgcaggttgtgaaggtcatgtggtgtcccacggggtgcatctagacttagctgggccctggctggcctttttctcggaaaatccgtggtcccgaggggatcgttggctatgatatgtgatatcctatgcttttttttgcgggaaacgtgtcataccttgcagaatccgctcgaggacgggggaaaagggggccgcctactccgtaccgcagaacacagtacggagtacaataggagaatgcagaaaaagagaaccatgtcgatcgcttgtctcagagatggatagtttcccgctctatgtgttttgtccacaaatgaaactattgtctgtacgtgagattattgtgagctagacaatcccccctcgggccaaccacatatccaaatgggcaggagatcaggggtggccaagaaaaagaacaactcaaaaagaagaacgggaaaaaaaagagaaacaccaaatatccactttggtcggattatctgggctccatctgaatgtaaaacaaagcccagtgggatgcactagctacccagcctagtgttagatgtgcttctagccccttctactggccttctacgccgtttctctttttgggctctagcgtcgaaatttcaagccccctttttctctcgcggttttgacttggtattggccgtaattttcctgcgctcagccacattccacagtccacagtagcggatcgatcgctgtttcaggaactgtggggaatttggcacgttccaattccgcgggatgcgttgctcttgagaacgatcccctagctcgtttggaatttcctaagatctgttgatcgctgggggagggataatcggtgtggcgttgcgtttcccgttgacacttgggtaaattctgcatcggcattcgttgatatcgtccctgagacaagggtctcgtcgctgggcactatatttacagatctggcatattatgtctcattcctcaaacttactagaagtaagcacctacctagaagagaagaaaatcctaaaatattacctccgcgaattgcctagattaacactatattaactctcgtctccctaatatcccgacacaatgacaacgtgttgggcagctgccatgtagccaatccgtgtcaagctcagaaaatagattgcctctcgaaaagtctagaaaaaaacaggattcccgtggaaagcaaatcaatgactcgcgagcttgtctatatccaacaatcaagccactgtggatttcgtccatagatgggtgttgttgcatgtggcaatatccactgtgccctaagcgttttcgaagaccctcttattcgacacagaagtgtcaaaccgtcaaaacaggccgtcgtggagtgcccgatcggatctacaaacatatattgcctctcggcatctggctgccaattggttattagttccggtctggaattccccttcgggattggagtgataagcacggaacggctgggacggcaagttacggctgtctttacagtgaacgcgaccgcctagctcaccgccgggttttcatcggcctttatgaattttgaaatgagatctagttttgacgttacttttatatgaactagatcgaaagcagacaagtcgtcgtatagtgtgaataaagaggcaaaggggcaaaggtcaaaggggcagactataggaaatcaagtatataagcaataggaattcgattattgcggattaaactacggagtacatattccgtgtagttatacatatgaactgtatgtgtataactcagatttgtgtaagtgtatataaatactgcgggcaaaatggttaccggcggtaaaatctgccgtacggcaagtgtttggtccttgagagccgctttggggcgtaaatcccttaatttccgttcaaggtctggcgctttacgcggataccggcaccttgcggaagaatttgcgatcaatatattaattttgccgacagagacaatcaatatattggttcttacggagtagttatgttgtgcttgacattttatatcttaggctttcttagtggatcattgttcggggctctcggggggtggaggttaaggtctaagggggcctcgattcaattcatgctccaatagtccgtacggcattttatatgtttccaagtgtaatcatctacacgttcaaaatttgcccgcacacccactgtgcggtcttcgtgtggagtgtccaatctcgttcgtcctccagagtttcggtatcgcttgctttgttgccatatcctgcgtgacaggcctttccaagtgcttcgaaaacaacaacttggtctctcatatgtttatctaaacaggctcttctgacggtggaatcaggtttcttgtctgcattggcatttggactctcgtttgagatttcctcaatgaatccttccacacatcggcggactaaatccgcagccccagaaaatgcagcctcggtttgagactcgtgcctatgatcatgagctggttgttgcttttgtttccccttgttcttgggcttgtgcaggcgatcgcctcctatattgccaagaatgtcgtggcctattctgaaacctgaagaggtatgggccacaagaaggatgtatacgtggctgcggtgattggtggcttccgatgtgtgtattttgataggaactggtgtatctttggatgatattttgctgagcatatcttcttcacatggaggcgtagagcttttggcaaatatagatggatccagctttctcgtttcacggcgaagcaggcgtcgagtgccttgttcgataaactgtcgaagagtgctccccgtgccttctgtgttgctgtttagggtgggttgatcaggtgctagcactgtgatatcaatttgcgtgactttgccgcgttcgtgatccatcaagttaattcgtgggaagctggatagaggctcgggtgacttcttgtgttgattttcgtcatctttcaatcgagatccaagtggatgtatgagaaaagtgacctctcccaggtcaaccggccccgttgtccagccgcgcttatgaagaataacggacaggggaggaagtccgagtttggcgaaattgggcacaataacttgcgctgcatagtcatatgatggagagaaggtagcattggttccaccagttatgttcactttcacaaagggtgtcgccgcctgcgatccaacatgaagtagatacgggtagagtgcctggaagacgagaaagatggcaccggcagttgagagcttgatgtcgtattcagacttcacactgacttgtgacaagtccagaagcggaccacttttcgatctggttgactgtgggcagaagttcaaggactgggagccaacctcgcctcccgagacttcgctgccgctaatctcggccaacagcttcactgctgcggcatgagatctcttgagccccttctttccatctctatttccgcgaacatgatcaatgctgactggacgaccagtcaatgcagacagcccgatggcaatgcgaaccagctgcccgccgccttccagagtttggccgttcaggtgaacgtggcttaatttggacgaaatagatcgcgaggccgccatttcaggagattttatctttgacagggatacttcaaatccttgaaatccctcgaaattccgggcgaaaaccaattattatattaattttgaccagagtcaggtcgtgaggctgcgtcttggcgtgagtcacttcggggctgggtaatatttattggcgccacaggcgtttttagcgcttagcgaaggcttagctctagatagaatattggaagggaaatcgagactcacctggggaagaggttgttggtttgttgtaaaatggaggaaatggaggaagtgaaaatggaagtcgccatggagttcgcaccttccctactgtgatgtgatgcagtactttcctctcatgatttcgcatctcttcaatcttccctctccaaatttcctcttctctgaatacctttttctctcaatactggctgtagctatatactctgcagacattttgtaacatgttttcttctacatccaatacacgcaacctaagaaggtccatgtccacccgctcaatacgaaaaccgcgacgactagccccagaaatccctgatgcggctgtgcagcatgcagccgcagcagctgcagcttcgcgtgcaatgcgctctagtcaaggctcgtctcaggactcgaaaagctcatacgaacgactaggtggtccaggaaattttgccatccctcgaaggcgtcacggatcaagccttcggagcactgatgatggctcgtccgtcggccagggcgactttcctaaagctccaaatccccgtcagtccaaagaactgaccggcgtatctgctcgagcgcattgcttcgatgaccctgcggcccttcccccaatcacagaactcgacggacttgacggacgagacagctcagtcccctcttcatatcgccgattgcgcaaggccaagtcgatgttctcgaccagccagcgaacttcacagaccccatatggagtgcctacccttccttgcagtgatccccttgatcccgagcgcagtcctggattccagctgccacgaacaatgagacgatccatgtcttttcttcggggaagttatcaatccaatcaagtcgctccaacttctaagggtcatgatgcggctattcagcttgctcgtagccaatttgcccaggatcccgacgctggaggtgttcagactcgccggccatctttcttgctaagacgcaagaaagagcataggccatttcgaaagtcgttccgggccacaagtgaaagtggcgtcgataccgggcgttctcttaaatctcggtctttttccaattccatcaaaaacaaattcaaacgtgtgtttgggttttccaggctcgatcaacaacctggtagcccaaatgcgtccatggtaaccccggctagaaaaagcattgaaggattctccccaaacaaggtttcagccattggggatggcactgattccaactatttccggccaatgccccagtctcccagccaagagagtctctgcacttccaagtcgcgcgtcaccagttgggctgattcaaccacgccgaacacagttacaactcggaagctaggacatcgccaatctctctctttgattagagaggacggattgaatcagcaaataccacggacgcctacaatggatgatacggaaaatcaatctcctctagctgcgagagcaaaccctcatcgaattagcattgttgacagtcaagatttgtacactgcgttgatgaaacaaatgggccagaattccctgcctaattccaatgaggatatggtcttcggcaatgtgtcgcagcatcgtgtgatcccagagcgggtgaattcggtctactcccaacatggccgacgcagtatccgtcatgtcccaagccaagaatcctcgacctcgcccggttcattcgcaaccgcgcgtggtggtgatcaatccagtccacgaaagtatcctcgctcagttaggtcgatgcaagtttctcggggcatgccgtctcagatgaaagatcaacatatgactgctgtttcggacgcaaagtctccgcaatcagcgtacgctttttgcgaggaatcggatgatgataatggtagcgttattgtttctcggcttcgggcctcgacaagggatattgtttccccaagtgtctattcccggaccaccagtggtaataccccaacaagaactgacaataccgacatcggcgttcatgatgaaccaggaacggcgaccatctttacttcacagcggacaacatacagctcacccaagcgtaccaatcgggcttcatcttccacacctaatgtaaagcccagtgccgactggcagcaatggatgagctcgcagattgaaagaattgagcaggcaagccccacaagggagcatgtcagagaatgtgcacaataccaggacgatgatgagtactttaccagcatagctcgacgagctccagtcgctgtctccgctcccggctcagcaactgtactcagggttccagactgccaaagtatcaccgagcgtaaagcttcagctgagaacagaatcctgtcacaaagcaatttctcccgtccattaacccaggcttccagcatgcgaaccatcatgccattgcagacaactaagtcagagaatatggtgcagtcttacgctaactcggtatccttggataccgctgctaagtccggtgaaaatgattcacccaagtcgatccctgttgcctgcaatcaacaaccgtcgccaattcgactaagatctggaaacatgcagccaccagagtccccaactcccaaaggtgtgggagcaaaacgatccttgaccaaggagcaacagcgacgctattcatctaggcgtgctccgatctcccaggataacaggatcaatcacttccggtccattcgtactcaacgagacaaccgtgtaaacaatgagaacgcgaggcaacaggatgagtacaatgacatgatggaaagctaccaccaacttcaagacattcattccacgatctctagcaagcgcatggtggatatgttcttggacagtcgccgtcgacaaatgggtgaagtcaccgacaacgatacaaccacagaggcttttctttgaacgtgggggactggctcttctgttattggaatacctcgggcgttgttcaatttttgatctgtcatattctttcgaggactctaatcattcattccctcattcattcaaccatcactttgggacatgtatactaaagctccgcgggtcggagttgtggaagcgtggaagcagccattgttatctttcattattttcttgaattaaaaaatatcctacccaattcattcgatattcacctggttgaaatgaataacagggtgattctcaaaagaaacaaaaaaaaagaaaatgctttaaataaacattggacccttggcctagtctaggctccagtggcaaaacacaaatcacattgcccgagcctcgccgttagtgtctcactttatctcgcatcgcgcacttctgcctgaagaaacgttggggctttttgtttttcttgctgaaaatatggccatcataagtcagcctaaatgcgtcagttctatgcgtaatagaagctcccatccattgttcaatgtaagcttaatgaaacaagtctaaaccgaaaaaaaaaaaaagaaatctctccctcggggaatcgaaccccggtctcccgcgcttatcggttttaatgacaagcggaaatcatcaccactagaccaaggaagaatgcgatgaccgagttactgctcggccacttggctggttgatgtgaggacatgaccatcttgtcattataagcgagcatccaatataattcaccttgtagtcaacaaaataatcatggaagcttcaatcaaaattttattcaggcaatttcgataaatatcttttccagtccaaggcaccatagctgaaggtttaatctattcatgagtgggcaaaaatcgataaccgcacgcaggtcatatatatatccctaaacggtaatagcctggcggtgaatattaataggttattacatacaagtataaaattaatcgcctgctacgtcgtatgtaagtgaaatgaattcgcacagatttccatcggaggcaaatcaactgcaatgtattcaaccaaatcagtccaaatagtcacctttgtctggaatagtttgttcagccactggtatccacgcgtggtaataaatggatcgccgcgtgtgactaagagttcaatgtagggatttcccgtgtaggtattggccgtgtgggtattcgccggatgggctgatgtcaaccatgtaggtattctccaaataggtgatcgccatgtaggtattgcccacatataagagaaggggatggccttgtttctgcgtaggttgagggagttgcacaaggtacataattatcactttaccaacaatggatattttcctggacgttctagatactttggtcctcgaccggtgctacgcagtactctcgccagacccaacagccatctccaacaatgatactcaagccactgcccatttgaaccaacatgtcggggtatattaccctatgcagccctcgaagtgggcggaggcaagcctctggaagagagacgacattgccagacaagcattgtcactgtacgtgattatatggtaagtcccttcactcaaagtaaccacagcatcctagaaactgagacctcgatacgcaacaggcttttcgcaatgataatgtacctcctcggtagccttctcctatatcacaccctcttcgacaaaagactactccaacacccgcgcttcctcgcacaccaagtcaagctcgagatcaaccaaggcatctccgcaatcccagtcatggccctcctcaccgtcccattctttctagctgagataaggggctggtcgaagctatatgatctcaccagcgactccccgttcttcggatacaccttgctccagtatccattgttcatctgcttcacagatagtggcatttactggatacaccgtggtctgcatcatcctagcgtctatcgctggcttcacaagccacaccataaatgggcggtgccgactccgttcgctagttatgcgtttcaccctctggatggatgggcgcagagtctcccctaccatgtttacccgttgctctttccgttgcagaagggagcatatctgggactgtttatgtttgtcactgtgtggacggtgctgattcgtgagtttttatgatctacttgcaacgagagtatgatggctgacattgattctacagacgacgctgagtacttgccaacatcggtggtaatcaacggcgcttcttgtcacacgatgcatcacttgtacttcaattacaattacgggcagtttacaacggcatgggatcgcctcgcgggaacataccgaaagcctaagggggatagtttcatggaaggtcagcaaatggatgggaaagggaaactcggaggtaagtgtgaatagatggagatccgggaagggcctatcttgtatttaaatgtaacactctcttgacagggtagtcatttgagatgatattaatatttaatataaatactatgtgattttggatgtctgtttcctctcgagtgttcggaaaagcgaatttaccatgtacaacatttggttatattgtatttatactggaaattatggcggactttgatgacaccattgaatgaattcattcaaattccccaagtcatcagtagcagtgttatccatataccgaaggctgacatcagatctgccagtagcatccagagtggcattcaacaaccaccaaagctcctgggcgtgtttcggatacccaagatgaaggaattgatccttatctaggagaccaatgacagaatcccagatgcgtctccaattgctagacgcacaccgtattctatcgagcgataggtatcttaataagccggctctcgcttggaaggcgagagaattaatggctatatgatattcttagcaattaatcaatggctgattccagttatcaacataccgtaaatcagaatcagaagatgctcaactgacaccgaaagaccccatggtattgggtcattacctagaggagtttcaagcaactgcgtgatcacatcttttagaggaggaagtgggagctctgtcgagtgcgacatggcaattctgctgaaagaagatgcactttcggcttcccatagcccagcactccaaggaaaatgacagtccatctcaaagactgatattgatgggtggtttttgaagcagacggtgagaaatccgtccgctaaaaagacccaacaagcgattcttggaactggttagcgatgcatttcaagagaagacaagataagaaagactaggatataaagtaccttatacacacttcctctgccaccaaatttctccaagtcatctcattacaaacggtgggagcggctcctcgcttgagctggaaaatccctagggatcggatggtggatactaaacatggatgtcggacgatgcggatgcgacgtctcgtttgcatactgtcttgtccaaattgaagcatctcaataataagagcactctgcattagctgtacatttgataaaagatgcgactggtctttcggtgaagtgagtgttgataggtccgcaattttgcgaaatatatactcttccgcgacgtcgaacagtccggatggtagggcccctccatctagtggaatagtatatgtggcaccggatagaaatattgcgagtaacagaggattggagatgtttcctgggtcgaaggttggaaaatgcaccacgggtaaatgccaatgcagtgagtgaaagaacgcagagatagaagcagagatattggaaacccccaggagagtagaaagctccataaaatcaagcgggcttagcgttcctgtgcttcccagacccattgactttgaagtgtcgaccaactccgtcataatctcggataattggttggaaagctttgaagggaagagtgtatcaggattgaactgaagtaggtaatcatccgtgaaagatggcagagtcgatggtacttggaaagataaatttgtaagttggaaatcgctatcaaaagctgacataggatcagtaggaacgagggcatcttcgatatgggaattgagtgtttcgaggttccggcgaacagaacactttgcagtctctccaatcgccagcctgtccctttggaaagaaggattggcaaagtgttggagaaaagaaaacgacccactgtctctcgagttcgctcgcgatgtggttatcgaaggcgagagcgaggttactgcggagcaactgggatccccggatatctcttgggttacgaaagtacattctcgcccaaaggagcgacagcgagagcagggtaaatttcggtcgcaggatgctttggcaaagtagcatagatcacacgaatgccttttcctacctggcttggctgcaggaggcgcaggttgattgaattttttcgcacagtttttgatatgtcttcgtgtgacctcactttcgagcattagatgttatcattatttatagtaatgatactttacatacggctttagaaatgatttgctgcatagaggacagctagaagagagctgctgtgtatctgggagatgatcagcctatgcataatttgtaagggcgttcattggaccttacgggtcacttcatggcgaattaaatgagtcttcctctggtaggctttttcgcattgtgtacattgaaacatgacgtcgacaccagtgttgttacaatctgaatgagaaaggaaggggaaaggggcagtgggcagtgggcggttgcgagtcagcgcgtggacgaattccatccgtgcgtggccgtatccccgacaaatcgtatttattctaacgtcgcaaaattgaagaaattcaatctcaacatgctattctattattgtcttgaatgaagatgagatgagaacagaaatgaacaatctcctggcgcatgcatgtcggtgactttcccaaatatcattatgtatgctatatatatcatgaaaaggaccagcattcttttttcccgtggcccagactgccaggaggaagcttttcattagcaaattttagtatgcagcgctattactccgtacccttgcagactctacatagcatggcatgatccaagcccagtcccagtgatttattgaagccttagggctgggcattgcctgaataaatgacaaattcgggtatagtcaccccgagaaggttttctcaagtgctagtttcctacttattttgccaacgccatgaaaagtaagctgattctttggggcaaactaacggaactttccgaacccctggcgtgcacggaacctggcgtacgtcaaattcgatgattagtggatcaatagaaaatctttttcaaaatcaagttgtagtatcacatcaactagtcgagaaagtctccttcgctcaagcacacggggtgttaggtaaattattatcaatctgcactctgtagatataccgaattttgtatatgagaaggggtggagctattaaaacgggacaaagctcaggatcaaagatgaacactcgcgtgcacgccagactgcagatcactctgcagatgcggaaacagacgttgtggatcataacaagatcgtaagcctggtggggcgcacatctctagcgcagccaaggaggtcaaggcacccccaagggttaaaagaccatatggggtagtgtggaatttataccctgaatttcgaaagttgcgcaatacttcgacgtccgagtatgccatgtcgtgtctgatttgtagggagtagggaatacagaatattttcccctggaaaaaaccgatccggattgcttggcttcgaatgagtcttgaaatgcaccgttcctgactacagacccttgcacgcaggtagccggggttccagatcagataggaggcacatgatgactagtctggggctacgaggactcgaatttggtcgtacagacattttcctggtccaatttgaatttttcggcttattaccccgaatagccctatattgaaactgatgccttgcttggagtgcccctgaactgagatatcacgagcacaaagaactgcctgagatacgtgcatatgggggctggactagctcggactacccccgagcgcattaactaaggcgctaattgcattagcggcccgggagtgaagtgataggtctagcataaggtttggatatcaggtttggttcgttgaccaacttgtcaaccaaaaacgagggaaattaggagcaggggaccaataagaaagttattgacaagcagaatgggctggtctagtctttcttgtttgggctaggcagtacgttgtgatgtagatcgacgtttcctcccctatttttgagatttctataacgaccgactgatggattggcacatataaggctgcctgtctctcttattcattcctgttcttcatctcttcgttgttagtttttttccacccaacactcgcttttgctggtatcattcagcgtccattctttctttcactctaaatatacttccaactcgcaaatatgaagcaatccatgatcacttcgcttgtggctcttgcagcttcatgctccgtaaggaaaaccgtgccattgttgctgtcgcaatttgacgtacactaacagattgtgtcactatagggagcccaagccactgagagcttgattagcgtgcccgttaatctctgcgccgccatcctcggagaggctgcatgcaagcagcagaccgtcaccaagggactgatcagcgtgcccgtcaacgcgtgtgtcgcagtccttggaaaagccaagtgtgaccaggtctcttccgctctcctcggcaaccacggtctccacacccgcgacagcttgattagcgtgcccgttaatctctgcaccgccatcctcggagaggccgaatgcaagcagaagaccaccagcaatggtctgatcagcgtgcctgtcaacacctgcgtggctgtccttggagaggccgagtgtgaccagacctcttcctcctctggcagcggcgacggtaccttgatcagtgttccgatcaacgtttgtctggctgtcctcggtgaggccgagtgccagcagaaatctacctctactggtagcttgatcgatatccccatcaacctgtgcctagccgtcttgggtgaggttgattgccgtgatggatcgtccaccccgcctcccgccactgctaccccatcttcccccgcgcagaccactaccccggttgtgattccaggaaagactaccatcccggctattgtaccgggtgagactacagttcccactgttcctgttgttgttcctggcgagtctactactcccgtcgttgtgccaggcaccaccatccctgtcgttgtgccgggtgagactaccgttcccactgttcccgttactgttccgtgcgagtccaccatccctgtagttgttccgggcgaatttaccacccccgtcgtcgtgccaggtgagaccaccaacactgtcgctgttccgggaaagactacagtccccactgtccctgttctcgttcctgtcgagtctaccacccccgtcgctgttccggttgagacttccactcccgttgttgtgccaggcgagtcttccatccctgccgccgaggcttctaccaccacagtctggactggccctaagggacctggctctcctcactcctccggtgatgcctccgcctgggttcctacatacacccgtgttccttccgtcactgtgggacgtccatcccacaccggcagcttcacccgtgttactgctacctctaccaaggccatcactggatccaagacctataccggcattgtggctcacacttctcccgcctccggtggcaacggaagcaagcccagcgccagcaccattccgttcaacgcagccggtcgtgctactttgtccggcgttgccgtggtgttcggtgctctctgcgctgttgctatgcagatttgagtggtggataatcctgacaaaggtggtggctggtggctggtggggatagttgggttgctcattgttgagatttatgttcctgttgcgttggacatatcagtccgttttactcattctccttctatattcgttaaatcaacatgaggtaatataattacacgatatacgtctctcaaattggtttttgttctcgcagtttagactgtctatgcatatgatgactctattgattatcaggatgtttcttgattcttgtacagtagtttaatgattcttgattgtaaaagaagtatcatgtgtattcgtagaaaagcaaaaagctagcgtggtacgcgtaccgataatcacgggggtcccagaaaactaataatagactatgtgacagatcgtatgcgaggggccatactccgtgcagatctatttctcaaaccaaagcaagtcgtatacaatgatacatagaggggggattcccaaaatccggggaagcgggtctgcgggtccaagttcgagtccttcatgttcccgaaagaaaaaaaatatggtagcctcccctaatttgtgtcatgagagatctactcatttaaaccagccgcgtaacgggttctatgcaggtgcgttgttagcgaatctcaatcggtcctacccccgacgaagggaccaggcggaccaacacctgttaggattcctgtgttctgagggatctcgccctgggtgaacgcgcgatctccgggttcttgcagttaacggaaggtggacagccttggcccagagaccgcaccgacggtcagatatcactgagctaagtggagctataactgttctgtttgtttgttataacagagctttttttattcttgtgatttgatcggtggatatctcaaggttgttcttcttaattaggtaatcatgaagctattccaaggttcaggcatttgacccttcgcagatcgtatgctaagtgagaattcatattattgcctaccgccaactttttgaaagagtatattaactagtattcttttatttcttcttgctgaaactctctcggcgtattttccaacgaaattcagagaggaaactgggccgcgagttggctgcaagggggttccgctatcggcagcttgctttttttctagctcatgagatcctggtatttcattggagtgctggcaaggtgttgagttccaaggatggcatggacttcaataaattaccatttaggtttcttctaggcattagtccggtttcttctgatccgtacacgaatcattgttgcccaccgcaatccattcctttgttctatgcgcactctcaatctgccttatcggtaactccaaatacctcccttaagcgagtatcatactcaattctatcctgtcgctttgtggctccaatcctcacaaaatcctgagaccagtaccatgacattgtctcttggaaggcctcatccggattctgacaatattgactaaagcggggctgaatttgcttgtagaagaccgaaaagagaccgggcttgcgagtgcaagagagaaccagaacgttccagatcgccagctccggtccattatcccagagaggtttgcctttcgagaagcctccccaaataatccttcttcattttccaaaatttccataagttcagtcctggctgcttcataatcgactgcatcttcggatatttctcggtcttggatttcgagtaacaaaggacgatttgtcaattggaggtaaccgtctttgtcgataacgaacgagccaattgacgggagaggtacacgcgctagacttagaaaaatccgagagagatcgcgaaaaaatgtgcgccggtagagggtcttagtctttttcccgccaggtagacgaaagcatttgtcccacattcctctcgatgtgctcgataaccaagtagcctggatccaacgcatcgcttcggtatctcgatactcgggatttattgtgaacatacgacgaaggaagggaacgtcctaaagacgaaagaaacaggcggcggaggtgttggaaataccggcttagtagagggagattgtcgatgtgcgagagctaggaaagtccatcagtatggtgccggttggttgtaaaaagaatggaagccacacagtctctccatcagaaggcgcaaacccgtaaagacggggaatgggtatgtcagggcaattatcttgtagccaagcatacgtccctgcttcgcatcgaatcttctcatcgcaattccctgtacaaaagtcctcgcctagtcggtgtgaaagaggaagtcgaagcaggactcgagtccccggctgttttctgactttccaatcgctgacagtgacaggtatacagacgttgaaacttccatgaagccaatctttaacatcggccacttgacatgagacggtcgatgaaaggcatgatgcgtgacaacatccttgatccaatcccgatgattattgagactggcaaaaaactcgtgtctttgactgggatattcgagtcgacgtaagatgttgacctcttcttttcgtgcctttgagtaagtgatctcacctctcagcagagggagggtcttcggcattgtgtaggtccttgagaatggactttccttaccagtgagagcagattccaggccaccgcttgaaaattgcaggttcgtaggtacgacgttgtggatcaaattgtcaactcgatgagcgccaaaccctgcaaataggggtagttgcctggttgcctaagacgtggtgtttgcttgtatagacgttgtttaaactcaggtttgacacttcctgggagagctgatgagataggactgtaatcgtgggtccacagctttctcaggtatggaggtgtttgtggagagttcaggtcccacgggtgttgccatcgggtcccacgttagcttccgctgtaaagcttatgctaaattcctataaccaatacaaaaaaaaaaaaaacaaattatgtagagtcaagactccattaacaaggtcaaaatcgaagaagacattagaaatcagaatgtcggtaaaaatgccaaaaaatcctctgacccgggatcgaaccagggacctcaagatgacaggttctttgcagaacaggacaattacagtcttgcgctcttccagctgagctatcaggggatgtgattagaataaactttcctttcttgatatatgaggacaaaaatgttaaaaatcattaacccaaaaaatcccctgacccgggatcgaaccagggacctcaagatgacaggttctttgcagaacaggacaattacagtcttgcgctcttccagctgagctatcagaggggtgattgaaggatgggcggaatttggatattataacctggctgaatccatgtctttgggctgcgaatgttgtttctggtgtgatggtaggccaagtgaatgagaactgcccaatctagtcacatgatgttaggctggtggaaataattccacctggccgctctgcagcatacgggatagttcacactgcatgctgtacacatctaaaaccaaaaaaaggaactataacaatgcggaattcctgaatatatagttgcctccatgtgcagctatcaaaaaatggaaatcacaactataatacagcaatagccccaggaggcgagcccactccacccttaagatgcaacggcgcactagtcaagaagaaagaccacttgttcaacgccgcgcattgtgtgctcagcttttccaggtcccataattccccgatcggagtaccccactgacacagtagccactcatgcaggcaacagtcctgagcataaggccaagcttcgaatcccatggtatcacaggccactgcagaaaactgtttatcgtatagccacctgacggtttccatgttgccttcgattccaatatattggcaagatctgacgcctttggcccttgcctcgggatctgccgtcctgtactgaagtcagctagaaactcatgatacgctgggaataggtgctttcttactcgtgccatttgacgaaccccgtccggaggatgaatatatcacccggtttgcattgcgtgccttgccattttaaggtttcttcgatttctgacagcggaatggcccaattactgacggcgttaggaggagtgcttgttggattgtggtgctgccaccatctcaactgggcatctgggtcagttgactgaaattaaaaagtagatctcgtgccaacatacccaatcaactaagatgcctcgtccaacaatgcccccgcgctcgcagatgtctgctagccatcagtcattggccctccacgacaattcgtttcacttactatgaattccgttctcgggccccttaactgcattctttaatgtgagcccgttataaaaaaccgcttggtcctgaatcgcccactatgtatagaatgactgtaaacaccaaaacttggaagtgaggcaaggaaaaacgaacgtgtttgagactatcccactgtgaactagtctgggtattgatataaatttcatcgtcaagaccaacaaagccctcagcctccatctctttgacatgatgacacaatgtagcccgtccagatcccggaaattgtagattattcatggaccagtcaagctggacatgatttccgaattggatctcttttgctgcctcccgcaccaccgatgggctgaggaagttgagagctgataacgtcaaaaatcttagaatagggtaggaaacaaaggccgaacttacttcctaactcgtctttcttgccaggcttgtcaaagaacccccagaggcatccttgcggctggccagctacaggcgggagatcttcgaatttcgggagaatataccgtggctcccggtgatcgacattttcatacgatgccatcttatatgctcctatccagtgttgaaaccttttgaagcggccagggagacctctttaagcgcggagaggacacccttaccgagatttggggtcaaatgccgagtaatctcgcttagccccgcaacttcacttccatgatggcttcccgtgccggtggggacgagtagccagtccccccaccttgtgcttgaagaaaaggccgaagaaagatgggtcaatcactccgtactccgtaccgatatccagctctaggggcttcaaagccccaagcaaggtagatggcaacacacattactggaaaatggattgttgttgatctagaatgtcccgtcggcatcttaggagcgtcggagaaaagctgtcccgagaagccgaaatagttggcaccacgtggaaacgggtaggttaccgtattgggcagttgggtggatagtcaatatcgagtggtacaaatacttttgaatgggagtctattacagtgtggatgtttctgagaaaaataataactgtttgtcggtaaacaattctgcttgcaggaaatggtccttagaccagatcagccgtgcaagtacgaattaagtgtccctggggcggtagaaatctcccctctccaacaacctaatatgactttccctccgaatatatcagagacatccgggaaaatgccgtttttgtagcgtgattcaatatcatggtctatcacgtcttgtcgtcggagtcgagctttgatgatatccggatcgtcggatttcggcccataaagttcgctatatagtgcctcgccaataactagcttaaatagggtagatcctagggcgaagatgtcggaagcttccgtgttgggaaaatcataatctcttggtaagcagtgtgatgctttctcatagccaagcgctacgtggccaggacactgcgaagaattgaaatcgccaagtcgtagatcaaagttctcgtcaatgaagaactgacgtagagcaaggtcggaatggataacaccatggctatggatgaaaacaatagcttccaagagctgctgacaccatttggatcgaagctcgggagtgattggattcctccaagtatttaacaaagtcaccataaggatagtatgtgatcccgatatagtcggatatgccccttgatagccattcggcaatccgtggatgtgttccaagaatatcgtagatcagagcctcacgtagtataggtcgtagatcttcttcactctgactgcggggaattttccgtatgataagatcgtccaaaaggtttacttcggcgaatattccaattgtcaagagctcgtgattatcccggcgttcggaggctggtcgaatagtgacggtagggagtggtcgaatagggaaggtaggtagcgtattttcggaggactggatatcgacctaaaggatgatattaaacagagttaataagaatcatgttttccacccacagattgcaagcgctcatcatctgtaatatttttcattaggtgccgtcgaagaaaacgtaataaataggcgtctaagcggccggaggaatagactgagaataatcgtcggaaccaatgttgcgcttgtcattatttggaaaagacggtgaaacagagagaatgatgaatatgtactccgtatgttgtacgcagatgcagtagacatgtgaccgttactactccgcaatgttcgtaatttttgcacgctggggtggcttagaccgtactaaagaattgtatatagattcgccggtatcgaggtggacgaggaaaggggggaaatgagaagggaccggagctatctactctagctacgtgtgggacctgtaacttttgcttgtcatgaagttgagcccacaactcaatttgctagggttcgataacaaagatgggttggtactttatatgactgatattggcaaagcagtcctcaagagtgagccctcaagtaaacagtctggacgaggaattttgtaatgaattcaaaccttttcactcccttgaccagggaaatcttcaacctcatccacatagtgcttatcgccaatcttcctgtccttgtcaccctctaaagctttctcatcgaagggcgagttgaaaaggtcagaaatctcttccaacgacttacgcccagtcttctcggagtcagcagagtatctggaggttgacagtttcatttgataaagacttacctcgggacagtagagcagcacaaatgcaagcgttgctgaggtgcaggcaatgaaaacaatataatatctccatccaatggtagcgaaggctgtaggtgcacattgcaagaatataatcgtggcaagaaacaaaccagagattgaaactgccagacctctcgcacgcacaggtgtagggaagatctcggaggcgtaaatgtatgacgttgcatcacacgtagttgaaaagcatgccatgtggaagaaaaggaaaaagattgctgcgttgacggcggctttggatccattatgttggaaaatactaaccgagatgcattcaccaatcaatgccactatcacgccagtataaccggccatgagtagccgagtgcgtcctactcgatcagctagcagagagttgatcaagttcccgaagggggaaattgtaatccagccaacctgaatgagcagctgggagtttgttttgaagccaagggatttgtaaagcgatggaccgtagtctaattaccgttagtaaagcctggtagggtttggacggataaagtactgttaataaccaaggtggccgttccctggcatccgaagagaaccacgaagcctatgatacatcttttccgaagggcaggtgtggtcacaagagccttgaagctatgatcctccgtattttccacacggatcatactgcatagattggcaaagtttgccgccaattcttcatcgtcttcaggggtcggtgtgtctgacgaagcagacactgctttgtacgcttcccatgcctgatcaatgcggtcattgtatattaaccagcgaggggactctggcagaaacataacaccgattgtcaggaaaatagggggcacgcattgaatagccagcggtatcctccactggaccgcagaagcctgaacgaaggagaatccaaacccgatccaactagataaggcatatcccacgcagatcatcacaccgtgagatcccacaagcaggcctctaatacgaggtggagcaatttccgactgatacaaggggattaaagcaaccagggcaccttgaagtttcagatatttagcgagatcgtagcgagcgaggaaagaccataccaacaccaagcccagtcacaaagcggaagacaaggtacgcgccaatgtgaatacctgcaacttgcaaggctcccccgatggcactggtcaaggaggccagcataatcgactttcgccttccgaggatgtctgcaaatgcgatacatgacaagcagccgaaaagccctcccgcctggaagagagcattgatagcaccttccaagctactggcatttttgcgcgtatccaaatcaaagtacgagagaaatgagggctgggcgagagtgcttgagatgatactggagcaatatccgtaggtcacactgcccagtgcaacatacacagagatctaggtaggatatgagccgtctgatgaactgaacgaataaatcaaggactgaccaaaatgcgaaacatagaatttgagagatgcatcttgtgtatggagctttggtcgtacggtgtcatgaaccagtgaagcaatccctgaagagtaggaaagcagatttccccggtgtctgaatctggggcccccgggcccagctcccgggtcaccccacacccaagataccgaggaggaagaagtttatattgatcagctcaagtggaaattggctccgctagtcacagtccaaattgcgtagaatctcgaaagtgggatacatacatccgactttgaaagaaacaacgtagagaatcctactgaacgtagtttaatatcgatcccatcaaacatcgatggcacccgaattcctcctgtttcccctcggctgtttcttttttttttttgcttttcggcgactccaaaaagtggagcactggtggtttatatccacaatcgaaacgacgttgagagtaaacttcccgaaaacgacaaaagaccttcgcctcctacttgaacgtgggttggatgttcggtaaaaaccttcttgccaaccattttagccctgtagagcaaaattggagatatgcagagctcggtatctcccatgggaagctcaaattacccgcccagtcacgtggaatatttattggtgtgggtagccccacttggcccgtccgtgggagccccacaaatcacatggccatccactttcgctaaacattaactaactcgtgaagaagggacccaggggcaccacagccctgcttgcgaaactgagtgagagcaaaattttcaatgggagtagtagggtgttagaaaggagaacattatggggtgactactagaagaagggaagaaggtggaaggtgtccgcgttctagtctccgcctcagggtactccgtacttttatatcaatcatatcaatcgcatggcttcaagcaattattcattagtcaatttttagtcatcctacactaaaccctggaataaacatgagtcaagctttccctatctagattatagatctgacagtgaaaggtctgaaatagggcaagcatccctgaatacctgaaaatttcacagtacacgatagccatgtcaacccgactgtaaatcatttactggtaaatatgagcaatacaaatctctaattccgtggactgacagcaaagctaacaatgtgacaccccatagcgtggtggaggcactatgaattcatactagaaaatgttagagtgttccaataccacgctatgaagaatcttacttgatcaaaatagtctttggctcagtaaatgctcgtaaggcctgggaaagtcagtaaatagcaaactcttaaagttcgatgaacgaatgctcacatattcgccaaattctcttccaattccagaggctttcttaccaccgaaaggtacttggatgttcatctgccctgttttagccaatgacaacacatgtccaccatggaaatgacataccacactgacacaattaacacctactacaccagattctatctttgaagaaactctcatggcacgattgatgtctcgcgtgaatactcctgccatcagaccatactcggtatcattggccaattcaatgacttcagcttctgtatcaaaagtcttgatcaccgagaccggtccgaagacctcatttttgtaaatttcagcgtccggcttggggttcaggaagacggttggttcgaggaaacatccctgatcgccaatgcggtttccgcccacggccagctcgcattcattcttagcccgtgcaatcattgcctggactttttcaaaggctgcggcatctgctagtggtccgaacttggtttcaacttcctggggatcaccgatgtcttttaccgcttctttcatccgcgcacaatatagatcaatgaatttggaagcgattgaacgctggacgtagacacgagatgccgcgacacaaacttggcccgtccgcgctaagatcccgttgattgtcctgtatattgtcattatactgctctcaaccttagaggctttgaactcataccatgtaactgcattttccaggttggcgtcctcgaatatcactgccgggcttttgccacctaagtttcagtcagtaggcttacttcctcgagcttgcatcatctcgacctaccaagctctaatgtgacccgctttagattgctttgagctgcagcaacttggattttctttccggtcgcaacacttccagtaaagctgatctttacaagtggtttagtaacaattttcaaatgagctttgacggatattgaatattccttcttacctttcttactctcatatggctagcaagccgcgcccctgtactgccatcccctgttaaaacttggacgacaccaggcgggaatcccgcttgctcaaatagtgctgcaactgccaaggaacctaacgggctcttttccgatggcttcacaatgagtacatttccggttgccagacatggtgcagctttgatgaaaagggatgccactggtgaattgtaagggttgatggcaacacagacactgttagatttgtcagtatcaattttgtacagaaataaaaatacgttatgtggagcggcgtacccaataggctcatgcctgacaagctttacaaacccgtcgtcgtcagggaagtaatctccgcgttgcttgtctgtccagcccgctacaataaatattagcgtctagggcctgtaaaacgtttcaattaattctcgcagcaccctaccatagtataaaagacagttccgaatgtagttgctctctcgggtcggaatgagtgagaccgggttccccgtcgtcaaagagtcaagacgcagaatttcaggcaatttctcctcgagcagattgatcaatcggtgaaaacaagccgagcgctcggtagcgctaaacttcgaccacggaccattgaatgctgcttcagcgaaccttacggcgttgtcgacatcgacatcgtccgctatgggaattccatctgcgacaagtgtgttgtccttcgggtttaggatggaaatggactcggatgaatgagaggcgctatacgctccattaagatacaactgattgaatgtaattggaatagacgaattgaggagagacatttttgccgtgaagttgatgagaggcttcaatttaactttactagataatttccgtaggcttcttcttatatgacaaaagaacatgagatcacgaaacgccgggtagattatattcggcttctcaagaatctttatccgagaatgaaaaacaagatgatatgagttccctacaatagtccggggtccggggaaggtttggccctttcctctcggcttctcggcgcggcactttcgctccgagtaaagagaccgaacgccacggatgaactaataaattgggatagaaatctatgaaatgaatttttcgagaaagggaaaggatcaagttcacattctcaatcatgtctatgaaagctgttgttttccgaggcccgttcgacatccgtgtcgaacagaagccaagaccgcggatccaagatgatacggatgccataattcgagtcacattggcaggaatatgtggaaggtatgaagtgtaccatatctgaagatttgcaattggctaattggcatagtgaacttcacatgtatcgcggccatcaacaaacggccaccgggcacatcatggtaagtcgtatgaatcaagtgacacgacaaggctaatatcaatgaagggtcatgagttcgtcggaatcgtcgaggaaacaggaaaggatgtcgccctgtttcaccccggtgatgagatcgtatctatattttctccagtctggtaagtttacaggcctgggtatcgtttacttccagctgctgatgataaaaagtttgaaatgctggttctgtcttcagggtttaacaaatcgttgcgtcaatggtgtggcgtttggcaccagcttgctcaacggcggtcaagccgaatacgtccgcgtccctttcgccgatggcacccttcagcatgttccagcaaaactagatcgccgactgctcatcatgatgtccgacatctttccaacaggatactacggcgcacagcgagctattgagggtcttcgcacacagtataattccagactcacatctttcaatttgaaaacagcaaatgagaagctccatgagtcgaccgttgttattcttggttgtgggccggtaggaatctgtgccattgctgcagctcgctcagagggaatcaagaccgtgtttgcgattgatagcgttaaagaccgcttggatgaggctgaacagttcggcgcgatcccgctcatgctcggagaggacgatataaatgctcgagtgctggaggcaactgacaatcgaggagcagatgccgttgttgaggttgtcggaaataaacccgcacttcgctctgcatttgatctactacgcccatgtggtgttttgtcatcagtgggcttccatcaaggcgagctacccttcacaggccttgaatgctatcaaaagaacatcacgttagtttcttcccttcctcgattaggttgcccggtctaacttcatgccctagtgttaactttggacgcgtacccgtccgtaccgtgttcgaggatgcgttgcagtgcttgacggaaaaccaggagaagatgcaaagctatattacgcatgagttaccactggatgatgctgccaaggggtatgatatatttgaacagaggaaagcgagaaaggtcatcctcaacatttcgaaatagctgaattgaattgaacataatcaagtccttacctacacgtaaagttcatttcatctataaatcatgatcaatagcgtggacaattcggcatgataaggtttagcgtacacatttttggatctggaggtctctaacaccgccgatgatagcctctgcctcggcgggttggaccgatcagccccgaggaaagtaccatggcctcatttccgacgcttaatctgaccaatcacttgaggtccaaataaatcaataaccgtttaggtcaagtgggatgtggggatgtactccgtaccgtaggacgtgaatgtgttgccgtcggcttcttccaatcatcgccgcgtggttagtcagcaatccttcggcttcatcttccccgcatgcaccccagattttgactgacctgtaagtgatcccggggtccgctgctcggggacttctcttctaacaacggcaatggatatcgcaaatagggaagccgagggcccgaagcagagacgcacacgcgtggcgtgtcgccggtgtaattcaaaaaagatcaagtgcaactcacaagaggaagttccctgtaaaggatgcgtgtcaaccaatacagactgtgtgcccatagaatcacagcgagggcggtatgtgccagtgtcaagtgacatctttttcgaaacataacggggtaatcttactaatgttctgcgtctaggtacattcgcaaaggtcctagggcaagaaatgctggaaaatcgcacgtccctcagaacgataaagagataccaccaatagcccgctcgtcgaatttccctactagtggtgttgaccatcttgccgagtcggaaatacccttgcctcccgaggatcagacatctagctccttccaaagaacactcgatgcatctgatcaagacagtgattgcaggttctacttgcatatcgcggaccaaggtgtcagctcaacacctcaacctatctcaagtcaaaagggcactctctttcttggcgaatcctttagcctgacatacgtcgttcacgacgtcctggcaccccttctcagcacagagtgtgcacccaactaccgcagacgcctccatttccctgtcgatgaaggattcgatccatctatgagaggtcagcaaaatatggttgaagcgcagacaaagctgctccatagcagagatctatggttccatccagaccaacgagccttagaacagcttcttgccatatacttcaagtggtttcatccagcgttccccattctcgaaaaatccagttttttacaaaaatatagtgagaatcagttatcgttacttttactcaatggtgtgctcatgattgccgttacggtctgtgacgaggcagacttggcacttcttgggcttcaagatcgctacaaggcacgcgagcttttttacaaacaagcccgcgcattatatgagactgactccgaccctgataaaattaacaatgtggtggcttctttcttgattagtttctggtggggtggtcccaatgatcaaaaagactcgtggcactggctggggattgcaataagctcggcccagaaccttggcatgcatcgttcgtatgtatattttgcttggctcatggtgtttgtatactgacaatttattcttttgctcaggacagcgaagtctcatatgtctagccaccgagtacgaatatggaggcgcatatggtggtgtttacgagtaagtatccgcttgatcttgtcgtactctctttctgacctagtaaaacccagatacgagatgttttggtcagtagctcgattggccgcccgcagcacttttcagtgtatgattgcgatgtggaaatgctctcgtcgcatgacctggagggcgagtttcaaaatgagacagaaatacactatgtttgtcagatggcccgtctttccacgatatgtgagtattccgatcttagattcatttctgttaggctaattgacaaatggatagtcggtaacatcatttcctcacggtatgcggcggtaaaacccgatcatccttcacagatgaagattcagctcgagaaagaactggatgactttcgctcgcaaatgccaacaattttgagatatactggaattgacgcaggggggaagatatgtctatggtcagcaatgctactaatggcgtacaagttagttcccctccctcatgattacatgtacatcatactgagacctggacagctttggagtcattcttctttgtcggcctccccatagcaatggcttagacatgtctcaatcatggggcaaccctttcaaagcttcatcggccgcaaatgaagtcacccgagtgatagaagatatactctcactctcaatgggaagggtctgtcaaattcacacgtatgatagtccacccaattgcagcatgagactcggctgacccccggaaatagaatcccggcactcttcaactcccttgctatacatgttttcacgatatgtacctcgcgcgctattggaagggaactcgccgaaaaccgagcacgtacctgtatgctgggtctaacgtctctacaagaatcctggcccgttagtgggtggattctgcggcttttcgtttatatcatggagcgattgaagtccacgtccaaatcaccgactatccctggatctaggccaggtctcttggatacaggtcctcatttggggccgggctcgcacgtaactgatacaccagccgcaaacactccgcgacaggtgcgtgatggtataaacactccaaaccagcaaacacaggccagttcgcatgcagctggaaacatatttgaggatttggatacatttcccgagatgtttgttcctaatatgtttcttccggacgcgtattacgagggccatggagtgggccaagcggacttttttgatctgctacgggttcctgactgggataacatggccatatcatatagttcttgagaattgtaagtatcaaaatataatttgcctgatatactgcatacacattttctcacttactatttactctttagaatcggaggcgctcacagccctagagcttgaaaaattacccccacgcatcgcttgacaaccaaatcggcgcacgcagctctctagtctatcttacaataaacacgcaatcgcagctgaatattcgccagtgattgtgggaatctattgtgtttacatatgaccaattacttcagcgcgtgataggcgcacccagaaaaattcagttctgtcctggcctgaaagcaatttaagccggaggagaaagaacggataaaagttccctagcttaagttttcctctgctgtgttgattgagcgtccgatggtatcattttagtctaaaaagactacgatggtgttagcgaccccccaaattgcaacattcttcacaccgcgccctatcaacaagctaattagataaatcgttcttatagaaagggttatctctagtaggaaaagaaatatttctaagacgatttaacgaaattttcatacttctgttattagacggctacacttgagatctcacatttctatgaccacaatgagtacggccactgcgcccacgcgaagatggtatcattggtattccccggatgatacgccagaagagagaaagttagtgttaaagctagatctgctgatcgtcccatatgcattcattgtctattggctcaagtacattgatcagggaaatatcagtaagtcaatcaggaaaatctatcaaaaccaatactaattgcaccattcagacaatgcatatctgtcaggaatggctgaagagctcaacttcactggtaacgaattagtccatttccagactattttcacagttggcaatgtcgttgcacttttgccttttatgtacctctttccgcgggtgccgatgcactggctcgtcccaactctcgatctcatgtggggaatctttactctgctgcagtatagagccacaagctatgcagaaattatggcttataggtttttagtctcaatcttcgaggtatgactccccaactgtccgaaaggaatccatttctcttactcatactgataggcatcctactttcccggtgtgcacttcgttctcggatcctggtataaaagcaacgagataggaagacgaggaggagccttctacgttggcctcaccttaggctacctgaccgctagtcttctgcagggtgccacactcgagtacctagatggggttaacggactaccagggtggcgatggctttttatcatcaatgctatcatgaccctaccgatggcgcttgttggctacttcatctatcccgggacagtcgataagcccaaccgtctcgtgatttcagaacacgatctagagatagctcgcaggcgactacaaagacagggaacccaagtcaaaagcgcctctttctcatgggcactcggcaagaagctctttttgtcgaagcgattctggctggttcttatatgggatgggttctttttcaactctagcgctaacacagcgtcttttctcttgtggttgaagagcctccaccgctacagctccgaggaaatgaaccagctcaactcaatcagcccggcacttggaatatttttcattctcttcgtcaatatcagcacggacttgtggcttgatcgcgcctgggctattacgctggcttcgagcttcaattttacggggctggtcattctggccatctggaatgtacccgaaggagccaaatggtttgcttacagtgtgcaatactcgtccgtcgcggtatcttctgtactgtatgggtggatgaacgtcctttaccgtgacaacctcgaggagcgcgcaatcgtactggttctggccactgctatttccacaatgtggacatgttggatcccgctcttcacgtacccaactgtggaaggacctcgctttagcaaaggataccctttttctgcagtcatggctgcttgcttggtgactatgacgttcgttattcgttatatctatggcccgaatgggtaagatctccttcatctttttcacgagggtgaccggttgctaatggaatgcagtgagaagaatataccatatgcgaacgatgaaaatgtgtccgaggatgagtcgacaggcacaattgcgatttctacaaccgagagagcgaagaaggaccaggtttctgttgtggggacgattttgtgatttgattaacgtatcttcatattgtacataagggtttcatcgcttagagcgttgagaggactcgctatcggaaaattgttggcgacctgaggttctacatatttgcaggacctttctttgtaaataaatttttcttcatgacaccgtccaagtgtattaatttgaacgtgaagatataatgagtagagatcaattacttccgatttatctcgctttttggtgaaaataggtagtcaaaactatagggttttgggatgaaacaggggcagggggtaactttatacagagttttcattatattaatctactctctaattacccattacaggttatctgagaaaccgtgaaattcaattgcattttaccatacgaatcaagtccttagcctctgttcatagaaatgcttcgtgccactgatagccgagggaaggaatgatgatatagtcggtactgccaggatcacgtgggcggtcacttgtaacacttcgaagggctgagctcaacagaaccagaattgacctagcaatatctcaaagaccttgcatttagaaaagaatgttatgtttatgtaggagtcggtcgtaaagctaacaaatagaatgcttaaagggtagttgtacacagaaaagtcctccgtacagcttccactttttcccgacggttgattcacatatcttaaaggggaaatatcagtaaaagagacataacaaaaccgcataagcggcggattattcttatcaaatataactagatgtagtacaaattccgctgtacccaatagtcaatgcacgtatataccaaaagactaaagagtgccttattacccaaacaaaaaccaattgactccttcctcccatctatacaaaatccacagcattattgccaaaacacgaatggtgcttgacctagggccgattgagctgttcacggcggtaaaagagaaggaaaccaaagctaaaatcacgattagtacattgccataatatgagttagggaaaggggcgggggtcactaacctagcaagaagctggaagaaaagggcaatccagaaccacgcattggcaactgtgtccagcgacgatccaacagcgggggagatgcttgctgggccgaccttgttgggcgcgaatccacgagcacaaattgtggcgatggatccaagagactgcgcggctaataggacgaaaacgacgtgtactcgtgttagcgtttgtaggagaatcattccaagaccgacttgttggatctcgtcgagaacgccgagccagagccagacacaccgggatgcgatggcgccggaagtcaggcctccagcccatggaaggtagtggccaatgttggatgttccccaccatgtttgcgcccatcgtggtgcaccgatactcaggccgaagacgggcaagatccaactgtgctccttggataagaagcggaagagtagcatcacagcgatccagaggataataaagaagaacaggaccaggaggacaatgtaccatggtttggtgtgctgagaggaccagaggaatgaccagtttcgaccgaacgcggcggaaaggaaccaattctggacgatgaccatgaagaagaaccagaggacgattcggcggcggaagagggaggtgtagaagaagaggatcttgccgggtgcttggcgatagtacttaggcaagccaagggcaagcagcataccgatgatgaaacaaaccgcggcaatgggcatcaccacagccgagagtctccaagaattcaaggcaactgtggaaacacctccaacttctgctgaagtgaccctggaactccagtaccacagggctacagtgtagagctgagagattccctggatcatactggcgcggaacatccaatccttcacagggacggcaccttggtcaccaaagttgagagcaaagaacaaggaaccactggaagatgctgcggcataggtacctgcggcgacattctgagcccacgcttgaccgagatccgagagtgcgaacggagaaacgccaatggtgatgaatgccatgcagtagatgaaccaggggagagagaggactatcacggacgggaagcggtagaagaggaaccaccaggcaatggaagagacgcagtagattgccgcgatcacgtagagcttgactgccgtctcaccaatctggccagccagcagggtgatctgcgcagagttcgttgcgataatctgtccgagacccaagaatagagcataaacaggccagtttccgacgcgccatctcatgaagcgctggatcgcaatgggtctcttgtatcccagacgagagagccacagatcaatttcatctgtgttgttctcattcgactcttcgtgaccttctgtgacgaggctgtacggtggggccggctcgtcagtcttgtccgagccacttccagtcacgggccgctccttgggctgcttcttcaactgcgcatcgctgtacatgtagaagaacttccgctcactcttcatgagataaagctcaatacagtaatctgaaatcgagttcttcttgttgaggttggtgagctgctgttcaaagtgccgcgtgaagtagcccatgctgtccgtaaaggtcgggtcgaccttttgcagatggaagttcggttgatcatgatcaccaacaacagaaggcaaggagaggacagacatattcggagcgtgagcgaagggtacagctgaatcagaaagatcccgagtcagtctcactggagaggggtccctcgacatgaaacgcgttgactctgaggtcgacgagattgactcgccagactgattactgtgtctggggtgcgcgccgaactccataggtgaattgactgctgccatggcctcttcttgagaaatgagtttctcctgtggtgtggcagtaccatcatcgtcggcgtccgtggtatcaccgtcggtgggctcggtgaactgactaccacgctgcgacttcctgaagagacgctttctgccatgtcctggtccagaccgtcgaccaagggacaggtttcgacccagcatgctacctctgttgctttcagccacttgcatctcttgagcttcgactgcctgtagctgcagaagggaaggctggaaaggctgtggtgctctaccaagtggtggcgtatccaaagccgtcgctgactggaatgatgaagggcgggtgaccagtgcagagtctcgcaacgctggtgtttcccagaagatttgagtgtctcgcgccgtgcctgcaacagtgagttgattcttttggtgatggatctgaatagatgtccgctgtaagacctcgagcttctgaacccactcgagaacggggaatcgctgcttggcagagttttcgcgcatctcttctcgggtctctggtgttgagtccaaagcggatttgatggcggttctcaactggtgcaagagatggcgggctgagtcagattcgacagtgtaccaccaaccaggcatctggcctagaccaccaatgcgagaaccaattccaagtgcacccttacgaccaaactcaacggcaatcaatccgaagggctcgtcgcgagacgggattagggcgaagtcggcaccagagaacacgaagggggggaggaccgtgaactgtggcttcgagcagacacggcctgggaacatttccacgatgcgttcgagcttgatagcagccagcttaccataaagatcaatgataggaccaatgcagatcagctggacattaggtctagcagacaggacagctggcataacatccgcaatcaagtcaactcccttctgcttagaccatcttccgacaaatactagcaagtcagcgctgggatcctcgtccagaccagcccacttctgtgcctgggctttgtcattggcgtgctcatcagcagactgaaccgtaacttgcacatcggggtccttcttcagggcggctgtgtcggagggatctggattaggaagactgccaatcttgccgaggctccagaagattgggtaacgggcccatgagcgctttccgtatttctcagacacaccgactgcgccaaagccacgttgatggaatcgcaaatagctagcaccagtgtgaagcaggttgaaaacgctgccaaactgacagtactttgtggccacttcgactgggagattgaacacagcacagacttctttcttctcttgtgcggtcctcagagcccaaagaccttggaactcggcattgtgcagagacaaacagactggaatagttcgcgacgggagcaggtaaagcggtgccacgcagccgtggaaatcgttgatgtgatagagatcaatcgagggtgttcgccgcattacctctgcaatacattgattccaggccgaatagtaaatcgcactgtcaaggtcatccatacgtggagggtatggctcggccttggtctgctggcggaaaaccggagcatcgagtagaacataggtgatgttatcgacaacgtgatactggaccttgactgagtagggatgatctaggatcgtcaccacgaaaggttcaacaggcgtatcctcagggtagtcaatatcgccgacacacgggaccacccagatgagattctggtgcttcagattttgggacatgagctgcgccatcactcccaggccaccaatcttgaccttgatcttccagtcttgaatgtcatactccatagtggcaatcaatacagtgcgtcgttgatcgctcgcgcctgccattcccatgattgttggcggagccttttctgccatattgatctcctcgacaccatctttggaaaacgttcctttgattctgcgccaaagcactaccggaaacttctcggccttgacggcattgccattcaggttgagtttgacacggtagaagtttccgatgaagataaagacaccggcacagcccataacaagcggaataacccagaaaagaataaagaggaccaactgggcccatccagatccgacgggaatcagttcgtaccttaggttgccatcgtttagggagatggtccagccaagatgcgggaacggtggcagaatggtgatgttgatgacgttggatgcgagataggacggtggaagcttttgaactgaagacgagttgccgacgtcaccgtagacctcggtattatcaggagtgccctctttgtcctggccccaaacgttcagctgacccacagctggccattcgtagacgaagtcgtaggtccagcgagacgttttggaatcgaacttcatcttgctgtccattcctgcatcatagccatattggttatatgggccgttgaaccaaatgtgcgggaatcttcggactgtggtgctcgcataatcaccttcctggaggtaatcactgcttccagtgagcctcgaaaagtactgcacccggatatgagttccgtcccacttctgggcgtccgtgccagtccaggctgggatggtaatagtcgtgttgccacctgaataagtcgtccaatcggtccagctcagaccgaaatcagccgtgtatcggaacttgtccgcaccagcagctctgtgctggatgtaaaggtcatcgttggacttgtgcactaggctggtagagtaattggcaagcggagaaatcaggggattatcagaagcgccgaggcggagcaagaacttgtcggtcgcattggtgtaaactccggaagtggaaacattttggacagtcaattggtggattccgtggtggacgttcttcaggtttgcagaccatgtccaaacagtcgggatttcgccggtgaagttatggctggtggtcctggcagagatattggcgcacttgacactatccgtatcaagcacggcggtgatgtttttctctgttgtagaatttaggtaaatggcatctgtgatgctgctgcagtccattgctttggaatatccaagctcaatgggcagggtttcgcccgtatcttccgaagatagcaaccgagcatcatgtccgggatagaaatcggtgacggtagggccgggttcgacgaagttagagctcttgacataggcccggtattcccatggaagcagctccattttcctgacgcatccatagaggttgacgttgtctgccttggcggggccatcctgcagggtgagctcatcgtaaggataaaagaggttcttcaattttgtccctgagtcgaatggagccaataaggacgtattcttatcgctgcagttgcccccgtatgtgacggttgagtttccattctgatacacaagccatagagtttcgttggccaggatcgcgtctgtttgtaccgcagggaaatagcttcgcaggacagaccaaaggccagtgaccgtgggggtggtagaagaaccagggaggtagatgtcttgtgtcagttcggagagtgtttcgaggtacaagccatccatggcgaccgggtaatgcgcacggatctcgaacatgcgcttcatgatgttacgcagtggatgggcgggattccgctggtcgtacgtgacagtgatatcattgcagccatcgcgacccttttcgatggggaaatcgtagaactttgaggtgttcaagttgaagcagccttgtgtccaccacgcggtttggtacgtcatgggttgccgaccgaacatatagttcgctgcggtagcgtcaaacacgtacatctcctgctcttctccccacaagatgagagggattccaggcagctccaatgtgatgatgtacaaacccaggaggtatttatctgtgccattttggagagctggccagcggaaattatcctggttcgagacaccatacatatgtctcggatcaacttctcctgtgaatgcattgaggaaatcgttagtgatgagcatctcattccaggcttcgatgaaatcggtaggcaaatcaaagccagcaaccaggttaccgtccatgcctaggaaacgggtcatcgaacggtaaatggtatagtgaaatgcggaggcatccaaagcttgcagcccatcgtctctcaggaacgccccatccgagctgttcgtgatcttgatacccgcgcctgcattggctgtacgctggtttggttggcggccgcggccgaggtagagactgccaaagctgtctccagatgtgatctcgccggggaggaagaaatttttcttgccgagtgcctgcgcgcattcacggtagacggccatcatctcactcaggggctcgagggtcgattgcacagacttatcgaagcggaaaccgtcgatgtctagactcgcgatttggaggcaggaatgttgagtgatcacatcgcggaccggcttgtgccattcacgtagacgatcctgcacggaggcgaacttggtaagttgacgctgccagtcggggaaattaccgaatgcctcaagctctccgtattgatcgaaatcgctgttatagcaacccttcaaattttggacgcccgaattggttaatggatatccagtctcatcccagaacttgggatagctgcaagattcgttatagtcgttaccgaagttgaaatcggcatattctcggtcggtgacccattggacttcatattcagatgctttgaaatcggcggaatcgttcagatggcctttgaatccgatgaggttgctcattctgtgttttgatcagctcatgaacatcccaagatgcgcgaagatcagagcatgacttacgttgccagtgtgttatccaccaacacatacatctcccgtttgtgaatctcctccacggtccgcctccagtcatccagtgttccataatgcatgtcaaggagggtggtatcgaccggcgagtacccatcgtaggcccagggcaagttcatcaagtacgttccggcgaagtagatgaccttgtcggtgttagcgatggaatcattaagaggccgggtccactaaccttgaatcccattccctggatgtagtccaacgtatctatcaacccctccagatcaccaccatggcgcatctgattggagttgaccacatgctcaaaggcggtcccgttgatatcgtcattggtcgggtcgccgttggctatacggtccaaaaagattgtatatgtaggcatgcgccagttatctggcgacggatgatagtcatggtccggccatgctccccaataatcgatggggctttcggcggatttgttctcgttgagattgtatttagcgagtggtttatcgtagggccaggcaaaggcaaagacgctcaaaaacgacagtatgaggaaagctgagcgctgcatttccgtatattactgttatcagcaggaacctgctgccggaaagatgcgcgactcaaaaaacgaatggatgaatttttgacaaatagcgagagtaagatgagtgaaagaacgaggaatcaactgaaacaagcttccagcatagtgatttgaaaggttttacagaatacaatttttactaatgttgtatggcgaatacatatttttactatggagaacacatccttatcgggccgaacggatgggtggcttggactatacatagtcccgtccactacgacccaccaggtgagattttatctatccactggcttttcgccgctgcttggctgcttttcgggtccatgtctcagatagatccaggatttgagtcattatgagcaggcgaccttgggttgttgtggtctaagtgcgcccaaccaaggactttaacttgactatgtctgtagtatgtgtatattatgtctatatcgatgtcttgtacacctcagcaggagattcatgacccgaagatgggcttatgcaaagtgcaattcttagccatacagctgcatcagcacaccgcatcatcgcatcactgtatggcaaaaggcttttgatgtacctaggtccaagcacagtacttcgtattcttttgttcttttcatattgaagtgtatctatcatgcaagcaactggtaatcatcgaagcttatctttgtaattaattaaaagggtttaatccaagctattcgattctactccctatagtactccatagacacgggacgattagatattgtcaaacgaggctatcacttgatcaacctggctctaacacccccccaaaaattaatgaaaaatacaccacaatccaaatgtctgagagacatcctgtttaacccaggcattcggttacagggtggtatattggtgggtttgtttccattcggatccgcccgccttcgacgtcacatcttggctgaccggccttttcgaccactatcgccagaacgtcgccagtgtgaatcaggaaataacccactgtaagaacttggaattcctgcccgtttaatatatgtcttcctgctcttggtcctcccagcctgcttcagatgtcttcccatgctccgattaataatctcgtatcccgtgtcttagatagaaccgagcaaacccaccctcccatatgtacctaacaattcgtcaccccctcttgttaagaccccggagaaaagtcttatcccggggactctatgccactaatgcagtgacggggcgtgggcatcgtatagaatcatgatatttgcttttgccgccctcaggtacgtaaatatacgtaagcagcgttatcatccgtggatgacttgcgcggcccagacgtggttctggatgcatggcttcgacgctttcttggtcgtattgacaataggggtttgaagcttattttatctacttggtaataccaagcgaacgcaacgttctaacctctactgtatatacacccggcgatacttgatgacccgatacgaacgtaccgataagagtagcttaaatatatcgagtcttgctatatatagccgaaggcgataaagcattgattggaccatgcgacccatatgatagctgtctttgaacgcctccattcagagtggagcacggttctgttcacttaattcgaacaatctgggtgatactcccatggcctgttcagaaacgcgctagcgcctatttgatctagcctggggccgatcgtcatatagcgtgaggaaatgtcttatgtatgccacgctggagcctatacggaggatggtaaaagaggatgatcgtggcaagcccaccaacccaggcccaccctagttgggggcaccaccggatagccaattttgggcaaattttcaccgaccaagttgtagtctcctttgtgtgtgggtttgccacgatacttagccctgccattactccagttgcctccatcccattactttgccctaggcattgacctatgagcaaactcggatatccgaagttcccccattgttcggttcgcgggcttaagtcggccgttccgacaacctgatttcaaaaacgcatttcggtgaactggggcccgaggggtatcccgtattgtgccggggtttggagggatttggccaggtgaggctgacaacaggcgtgaatggcttatttaccattggctgatattgcctttcgcctgactctccgccttcctaatttatacacacgatagatctgggtacccaatctccgattcacgacaactataccccacataaccagatcttcttcgttcgcacgcacatctttctttgctcatgtatctttataatatagatgccccttacttgaacttgacgcatttcaaagacgaggttacctctcgctttgattcaagaccacacacaatactaatttttgggcacttgaaaaatctttcataaaagatattaccatggaacaatacaaggcctagacacagtccactgggtcaattgttgccttactgccggtacctgggcctggggttaaagaccaaaccccaagtcgcccgggctattccgtactcggatcaaaacacccttcgcggctagcgcggagtacaactttcgaaagcatggcgcatgagaagctctatgtagttacacaggattcttgaccagcctataggatcgtgcttgtggacagtcataatgcgaaaaccgcttcccagaacggcgaggtgcataaccgattgcatacaaggcatgatatatattgcgagaatccacaaatatcgcaacaatctatgaaaatcagatcgtggggtctacggacatatccaaattcgattagtccatggcatacacaatatgcttcatatgcgccccctccagggctaatgccgtacaacatgattggaataatataaagtcgagacatcttcttggaaatcatcatgttcagatcaaaattcagattaattcacgcggaagatggtgtctcccacatccaacatatccgagcacctgctcttgctggtgtacgtcgtacttgcctacacaggcatcaagataatctaccgcttgtatttctctccactggccggattcccgggtccacgcttggcagcagcaaccagtctctatgagttttatttcgacgttgtgagaggaggccagttcatgttcgagctggaccgtttacatgacaaatacggtcctgtcctccgcatcaatccctacgagatccacatcaaagaccccagcttctacgacactgtctatggcgggccgctaaataaaagagacagagtgcctgcgtttattcactcgggaatgccccgggcaaccttcgaggctgcgccacataatctccatcgcgagcggaggaagttattgagcccgttcctttcgacgcaatcggtgacagatctccagcctgtcatccaggagaaggtggatttgatctgcagccacctgtcgagaagggtcggtacgggggagttcctggacttgcactctatctttgcttctttcgccgtagacgtgacgtctacgtatgtgcttggccctacgaattgctataactacttgaagaacacagagatcacagacgaatggaagcaatatatcaccagcatcttcgagggcctgattcttctcagacatcttccattcctggtcaacccggcacgtgcttttcctaagattgccaccttcttctttcctaccttcttctgggctcaaagatgcgaaacggtatgtatggttattatctggaatgcaaatatactgatagaggattagaaaatagatagaactgttagggctgcgtacgaaaaaccagacgagaagtcgatgttatcgactattctctccaataagaaactgcccgacgaggaaaaagaactcgaacgcctagaacaggaactgaagtttctgatcattgccgggactgacgcgccttcccaagtgatggcactcactatgttccatctcctttggaatccagagatatgccaaaaactcaaagacgagttagatgaggctttcccggttctgtccgacgcggactggactaagttgaaatatcttccatatctggtaagcagtatcgatccgtatttttttcatggactttattaacaacgtgcaagtctgctgtattgaaagagggtctacgaatttctgccgttgtgacatcaaggcttccgcgtagtgcaccagatgaggctttgcaatacggaaaatggaccattccacctggggtatcttgtactcagtctaccaatcttgttcctggctaacacattgctctagacacctatcagcatgaccacccactccattctacgaagtcccgaagtctacaccgagccgatgaaattcatcccagaacgctggatgggtcctcccgaggaagttcgcgtactggatagatatctcgttccgttcgcgaaaggcaattcaagttgcatgggtcagaggtaagtaccttccagtctcttaaccagttccagaccagcggcactgatatatactagcatggcctactcgtggctgtacgcagtgataggtaccgttgtccgcaagttccaattggagcttcacgaaaccgacgagaagaatattcatattgttcgggactgtttcaatggacagacggtccctgggctcaatttgattaatgtgacagtcgctaaagagttcaactagaagggtctgcatgtgaattatcggtctgttttgcatcttgattagatttcattctgtcatctctcggttcaactttcccccctggcacttggaattacctgcttatgctttgtctcatagaagaatagaagggccaggaaacagacacaagactattataacacgcattagaaaaaagcccaaatcaatatataaaacccacctgacatccccaactcacattcaccagtccctagactatctatcccctagtcccaaaaacataatcccgatcaacagccagccgcccagccccaatctccctctgataatgctcgacaagcccaataacgataaaaacccagccgcgctgcccaaggtccttatcacaattcatgacgggaaacgagacatacagctcgcgccggtgatgcatggcctcgtagtgggtgatctcacagtctccagcgcggcaccggtcagccactacgtccatcaactcttcgtcggagaagaggtagtctgtgatggatagcttgactgatacccaccacaggtccgtcattgggctgaggttttcgtagtggggctgtccgtttgagaggaagattgtgcgtgtgtgccttagggctgctcggcgtcttgggcctatggggttccaggattggggtagttttgatctgaacatggcttgatggtggtggggtggagttggggtttgggttggtttggatggaccgtcgccgtggacgtgatggaactgcttcttgtctgatggtgtgtagacttgacgagggattccgaggttatttaaatgcgatgtagtgagacagtggacagttctatcgagagactgtctttgacatggttgggagagaacaaagtcttttatgtgaggttgttaacaatggctttgttggtctctgactagttaggcaggtactatgacaatgtgaaacgaacaaagcctcgaagcctttcactgcttatgattcgaaatcaaggattcaagaacaatgtcgatcagcgctttcccttaaggagcttgacattcgttagtctgacattcagttcttctaatcagagaacaatgagatttctctgatggtatcgatcagttcacactagacttagatagtatattgatgtcaaacctagtagatcatccattctccatcgttgaaagtgaaaattttatgacttttaaaaacgtctgatcttgctgggatggaagtatccagtatgcagctatgtaagtctcgacaagattacgcagtttcaaaggtcatacgtagaaattcgtcaaatctatgctttttacttgccgtttatgaaacttaggaagaagatatcaaaagaaaaaaaaatctaacagactaatcacgtcgttctcaaaatagaacgcggccgagtattcttacaatgaagaggtcgtgcaagaagaattgccgattggacattgttttccacgttgccccaggaaaaaaagagagaacagatgccaaaaggctagccacaaatacaaaggaacataaccagcatgaacagagttcattaatcgtacctggataccgcgtaggggttgatccaaataaacttcgatgcgtcattttaatgcatgttaataagccgaaacctctgccgaggtccagagcagagcctccaataccactactcaacgtagttggcagggaaaggtcccttctgtcctctcagctcgccttcccaccagtcatccgtgctatcggtcttccgcacgacgcggatgcggtcaccttcccggaaactcagatcgccattcccctgtccgtcaaagtcatacagcgccgtgacaaacactggacgggatgacggcggtggtggcgggggttttttcttccctatggcggcagccatgggtgataccttggcctggaaagagtctacattggggccggcaggtgatctgaccactcctgatgaaatgggagtggcttgtggggttggcatgaatgtaggacgagggggctcgaagtagtcaccgcccgttgcgaggggcttagatcctgcggcgtttccaacgggaattgcgctgctcttgtgactgagcgttgacaggggcggagagggaggatattctggtacacagggtgtctgggccgacgatcctggtgtttgtgagcctcggcggtaagacgggagcgaggttgatgaggcattgctaggagcgcggcttccaattgaagggcgtttcttattgtcgtgctcggctgcagctcgacgcatggccttgccaatggtcagggagccgaagttttctatttcagtttgcacaggtttgaaggcaaactcccaatcttggacaacttgttccatgtctggtggcggggaggggaatccctcttctgcacaataagtgtgaaggactgtgtaatagtttgcaagcatgcggttttggatctcgacctgtgcttcgaggaaatatggcgtcagggagaatatgagagcgattaatgttgggagtcgctgtcgtaggtcctcgtcggcagcttggtaagcctggatggcgattagtgtttcttattctatgaatagtattgggcattgagattgtacctctttcgtatcggcaagttctgcctccgctttggccaggttcgcattgtcgcggtcggtgcgctttggctttttcatgaggctatcaacacgtccttgggagatttcaaagtcggtctagaattgggatattagaactaatccaccaagaacgtcggtatttattgtgtaccttcttgtcgtttcgctttttgatcgtctttttcatcggcgcaagggattcctttgcctgcgaagccggcttggtcatgcgagtatcgacagcaccgagttcctctatgaggtcgttacgtagttcatcatattccttgcgcagtcggtttgtccgagctaatctgacggggtcggtatccacggcgttgtggttggacggggtttctgaggaaccaatgataggaccgtagaggccgtcgaattcatcaataaggcgactctggtaagttgcgatagagatccaagcatcacgccaggattgggtagattccacgatctgattaaataacacgtatcaggaaatgcgacagaacgcgcgtcatcggggtaacattgtctaccttgcctaggagcatatctgcatcgtcgaagtcttttaaaagcacagcaatttgactgtcatctgcagacgacttcgtcgtcatgcgaccaaagcgtctcgtcatgttctgcatgttgggcgatgagctctcagaagctggggaacgcggaacgggaagagaggggatgacagaagcgtgtttgaaacaagagtgaactttaattcaagtcaatattaatcaatgtattcaattcgtccacatccaatgcaaatgcaaaatgtagatgatggggaagaaacattgaaagaaaggaaggggaacgtcccatcccctcatgacacataactcagccccaatgcgtttcagcctttcatgcggctcgtgccacgacccctccaacgtatttgacctttcgggaaggagacaatgtcaatctcctgaacccttctccactctggatagatcatattaaatccggttatccatcttatctcgtcgatgcggaatactagtatatgccctacagagtacggagtacggtgaggcattatagtacttactacttgctcataaaatacagtataacatacacatattccgtacaagaggcgcagatataaacattgaactctgggaatcgacgaatccatccgtggacggacaaacttaacctgctgagctcagaactctatatctttcacgtgatccggatcttcatttatagttgccaacgtcaataaccagttaatgtaacaatgtcgtattcgtgttctcttcggtcataatccaatataaaatacggagtagtatccccgatattaggcaacgatcaatagctctttctattccgggtatggcgccctcactcccacccccatttggtcctagcctcacccgttttaacagctaaccgtgccaagcgcccaacacgcacttggcacggctaggccgctcgccctacggggtacctttaacggaccgagagaatgaaatcccacctttgctacatagaattggggttgtttaacgtgcaaggtgaatccagtcgagaataccttatctcgttgtggcatcgtataacgcccaagtctggtttccaataaggaaaatatcacctattccaatctaaggaatacaaggttgtatagcaaaagtaatccacaccaaacaattaatttccacaagtgagagtttttcctattcatccaatgagaatcaaactccaaggaaaaccacattaatcacgcattgttcaagccttcatacggtacctatacaattggcactcgaagccaatcttcttaggctcacccgaagaaagcaagtcaagaagtccgcgtttctccaggtcttggcagagttcctttttcaacagaaattcctttctattcccttcctccctgtgtcccactctgctacttccttccgcttcagttccttcgttcaagaaacgattcgtgtccaaagctagatcagagactttgccatatttgttatgccaacatttgtcgatgatatcgtcaatccgtggattgccattcaattccggaaactccatgttctgtagcaaatccacggtcttaggaccatgttcgtaggggtcctcggtaagacagcgatctctgtaaacctcaaatccgtagttgatataatagtataaagaaccgagggcgaactgctctgtccgcgagccaagggagccggaacttccacaaatgccttcatccggttcgttgctattaaggaatctgccatatggacctatacaagcttcgtgatccattccgattttcgccgtgtaatcaaagtcggataatttgagtcggtctcgattaagtagaatattttcaggccgtagatcaccgtgagcgaggttgagagattccaggaaagcgacggcttgagcgagatcgtttatccattcctttcgtagggatagcggttccaacttttccactttagtaaccaccatattttgtcggttccaagtatggttatcctgtattctagaaaatagcgacctgtctattataagtggttagaagataaacctatcagctagtgataaaggtcacacctctcatgtactcgaggaagatgcctttgtctgaaatatgaaaacattgcacgataaaggggcaaggcggattttgtgagaatatgcggtatatctcgacctctttgctgaattgttccctttcctcttctcctgactgcgggaccttgaccgcaatgcgagggtcaacctcgtaaacgaaagagatgcctcctttccagatccagtggacactagggaattggtcttttatattcatgacgaaaatataatgtgtaatttgactgtttggagagcaggacagaagcaagtgtttcctgtgattcaaggggaggtgagcagaggggaaaagcagggccaggcacagctgaaccatgaaccaatgatgatgactcccgctttccataggcccagccctgtctaattgtaatcgaggcggatgcgctggctagtgttatcgttacgaatcagaagtctggaacatccctgagctcctgccctaaatggcgtagcagcggtcatgcccttgtaaattgttgggattctatcaacacgaactaccggcatttaggcttagtacttttgatacaactttgctttctctgcgctcatgtttgcactcagcatgactgcatagatcacttatttcctttcgcccgagagaaacagtttatttaactattgaaatggaaagcgagtacaacatacgaagtatacggatataggctcagtttccaggggtttgcaatatcaagttttatacatactattcaatttacaacaatcccaccaaaacatatactatgtagacttagactttatatctacagattcaaaaaagagtataacaacagaattacagtatgagttctaggacgactgaattctgggcatatacaaacgtcttgtcgtgatgctctcaaagttccgcttcatccatcttcaacaaacctttctgccaccacttctcctcctcttccacggccgctatccgactctttgcctgccgaaatccatgtccctctccatggaaaatcaccaacttaggatgacgaccagcctttttcatcatttcgaccatttcctctgcttggttcataggaacgaccgtatcctggtctccttgaagcaataacagtggcgcagtaatcttatccgctttgtaacagggactgcgttcgcggaaaatgcggtttttctcggcttcatccgcatcaggatcgaacaacagggcgaatgcgtaatggctctcgaacttgtgagtatcctcacagagcgccttgacattgccgattccgtacagagaattgccaccggcaaacaggttagggtagtcacaaagagcttggagtacgatgtatccgcccgcactttggccgcgaacaccgactccgttggggtcaattcggccagacgatgccaggtatgacacacaactagcagcatctgctgtgtcgaggattcctaataactttagtcagcattggagggaatggaataatctgccatgagaagagtgaattctcaccccattgtccattcaggatatcccggtatgctctgccatatccggagctacctccgtaatttacccagacaacagcatagcctcgggaagtccagtattggtccgtgatatttaggccagttccggtttgcgatgttggtccgccatggacgcagacgatcaaaggcggcagcgctccagaaggtgcttgataatctgggttctgaggtgggtagaagatggcatgtgccactccttccaagctcttaccgtggactcttggaaaagatagatgctctggcttggaaacaagagaacttggcatggggagctcggaagctaccctgagtggagtgagcttgacggtatcggcgatgtccaatgtgaagacagtgctgaagcttgtttcactggaaccaagaagggcgatttttgtgtctgagagggggttatctgccaaaataaccgtgtccgtcactggcacattcaggtcttgccaggtatcattcgacagatctatcagaatgaagctccatcgagcattcttgttgtacgacgcgatcattagagttggagtcaaacacacgtatgtgcagctgtcaaaatgtaggtcagtcatcaaaccagctgcctcctggggtcaagactcaacgtactttcctagacgccagtctggctgcgaaaattctacctcttccaggccatgcagggccacacgctggctttccagagtgtcaaagttgaaccgatagaactgccaataccccgaaacatcgctcgtgaagtacaacgtgttatcaaggccccatcgtggctggctgacactttctttcttaggcacaccatgcacatggtgaacgtctgtgacctcaccattgttccacttagcaacatacaggcgagctcctgtccaaggcatatctggatgagaccactgggtccagcatatcttgctgccatcgggggaaaactgagcagcactgtagaagtcgtcgccggaggcgacattgactatctttttggactgcacgtgtaccgcgacgagtcggttccgaacttccgccggcaagggcttggagtggtcctcttcgatcgccaagagccatcccgagtccgcctgactatctgacaaagagcctatagcagaggtgcatgcatagcggagatcagtgcctgtcgtggtaagctgttcaacaagaccggtggagggatcgagtttgtgcaaatcctgtgtctcccgatcagaaaagacgacctgtccgttgaaggcgatcatcgatgcgccgccatattcatgaactttggtgcgagcgtcatatctattggactttcattagagctgggttcatacatggctagatctagtatgtacttggccggtaagatatcgcgtccttcaaggccagagtattcaacgacgcagcctcgtccctgctctccgggtcgaccctcgatgacaaaaacctttccgttagatgtctaaaggcgccgttaaaattttgggcatgagcgaaattgaggtttattgaacataccgcgatggattcaaactgaacaccgctagcgccaagcaatgcagagctgattgggctcttccattggccgaacggagctgtgactggagtagccatggatattctagcaatagataacttattcgtcggattgatcgagttgatagtcctgttgggaaagtataatggtataggtgttgtcagcgttgtgaggcgatggtggaaaacagacagtctaccccgcatagcctgcaacatagtgaggctggctgaaagttcagctgagattcaattgaaaacgaccagtaataaataatgcaggtctctagttcaaatcttcttttaggcattcacaaatgactcttgaatacctgtctttatacctacaacatatattttccaagattgttgcctgaggcctctaaaccctaccttatcagcttatcgtttccactttcaacgcgaaacaacgcgactgaaaccacatttcgcgactccatgcgatgcgggcatgatcaaattagttattccacaatgccacaatgatttccacaccgtcttcctccacgcgtcctcctccgacctctccgcaggtcactgcctcggtcgtgaaatttcgctgcctgtacactcacgacttacgccgcaagtccaaacgatggcacgacggacacttacgataccataaacacaacaaacgtgttatggtatacgatgaccagggtaattttatcggtgaccaccactggcgatccaccgatgaagtacaagatggcgacgaaatggagctggacaagggcgtcctgattgaggtgaccgagaacatgggcacgactgagactgatatcacaacactgtacgaaaaaaagaaatcaagccagggctcgccgccggccagagacccgcgttccccctctacctacacgccttccgcctccgtacctcttcgcggttcccagtcatttcgctcactttacgatttgctgggcattaaaaagactccgattgggcatttgatctccccgcacgaggaaaggaatcctccgcaaccagcctccagcattcaggaacccgaaagagcaccgaagcgacggaagacatcctcggtggtgaatcgaggcgagcaacgctcgcgtgtgggtgaggtgatcgatttaaccgattcaaccgattcagttcagggactctctgagagggaaaggccgaaacaaccgaaaaagccacatagagctgggggtgattctacggctgatgcagcactcccggtaaatcgtgagcagaggtcgaaaccaactcggccacagagacccaatcctccttcgttctcaagcgcctccgcttcaactgcatctgaaccgatctccagtctaccaacaaccgaagaattattccgtacacccgccaagggtttccaacctgcaaggtcactaggcaataaatcgaaagatgacccgccacctattcaaccgccaaggccccgaggcccctccacaagttcccttcccactgtaaccccagaaactgaaataccgaggccacgggagaccttgcgcgtggagcagccatcaatcagccgcgaaaatcgatcaagagctctgtcacgtcccatcccaccacagaggtctgaccctccggcggcttcgaggagctctctcacaagcgcacccaaaccgtcgtctgctagatctacaccacagacgccggtgcgtgcagtcagcaattatgtgaaccctatcgaacctgtgtgtaatcaagcttcaatcaacgttccagcatcagtcaacattccacctccagccaatgttccacctacagtcaacataccatctccagcaaatatttcatcttcagccaacattccacttccagccaatgttttacccacagtcaacgtaccatctccagtcaacatctcatcttcaacgagcatgccgcctccatcacgtccatcatcgacactacgctctggggcacctacatcctccctacgcatgggagtcgggaagccacgcaggaaactgatgtacagtgctctattgccgggcgcttcacgaactccatcgccagcgacctcagatacatctcctggtagtgcaagtgagcccgctacaaataccccagagcaacagttagtacggtacccacccattaaccaaaattgtgatactgattctgtgcagactggccgccgttccaggtgattcttcgatatcaaacgaagagtttatgccctcaagctcgacacaatttatcttcgacgagatgatagatggatcagggttcaaatcgccctccacaatcaaaagcctaaccgggaaaagatctctgaattcacccttgcgcaagtcgatgtccgacccgattgaatcgactacccgccaggttcgagcaggaggaccattacacgcggctaacaaggaaaacgagcccagagagcaaggcccttggacatccgaggccttggatttgtttgacttctggcctgctggacgaccaaaaccaaacgaatgaattacgtactgtggctcggtttgagagctgggcatgaggttctaagcaacaatgagtagggttcaaaccagattgacaacacaaagacaagagccttccaaggttcttgtacctcacgatgtctaccgtcttatgggaagcaatcaccaagtcgccgaaaccgttgttctcgaaaactcagtgagttttccgtagtgttcctgcgagggataactacttttcaagatgccaatcacaagtgcacaccttgcgaaaacagtgcttgcaattcgtgtcggggaaacccatgcattcatatccacagacttccttccccgcctctctccccaatccgtcagggcttatgatttagaatgcttctcttcatgaagctttatgttatctgtttgtccgaaacaagccttcgagacccagaacgacctcgatgctcttattgaaacaagggaaatatgatagaacaaagatacccatttaacattgatgaaaaataaatctatacctaacgcacaccaactcatcgaacttaaatccccttcttaaccaaaaccccagaaatataaggcatagccgaccactcaaagctcctctccaactccaccctctcccaccccccatccccatcagccgcagccctcaaaacggcttcagtatccctatccagacaacaatccccaataaaccaactccacccaagaaccccatacaaaccctgcacaacccgcccaacaaccgaccccttcgctcggcgccacgggttaacaacatgctcggtcacaagcaaccgcccaccaggcctaagcaatccatacaactcccgcacagtcctctccatctccggcacggagcacagcacacgcacgcacaggatcgtgtcgaagattcccgcgcgcgcgtcggcgtcgtacgcgtccacgacgcccgtgcctgtcgctcgcagggcggggatcagttcgcgcgctgctacgcctgtcggcacgatgtggtacttggcggagatgttctctgctaatgcttttgcgcggatcgaggagtgcaggcttttgcagggctcggcgccgtagagcgctgttattgagggtgaggttagtaggggcatttgggtgccggtgcctgggccgatgtcaagcactatccctgaggcggtgcggaggattggggggattagggctgaggagccgactggctcggggatttcttggttgtttgggtcggagctcatttggcgggaggctgttgatggtggtttggttaggagttgtgttttatgtgtctttatgtattctttataggacgttacgtcttgcggtttttctcgttcatcttgtagagatttctaagagcaagaagctcccctctgggtttgttgatgtgtggctgggactcactggtgaactcgatccagaatcttccgaatgcttcatcgcgaagtctctgggtctgggtaattggggcgaagagctggccgtttttgaagactgcttcggcgcagactcgaatgtagtctgtattgcagttagtaatgtgtaagtttatatcagatgagatattggtgctgatgtgcggagaatgtccaacaatataccagacaaatacagggagattcccaaaagaagaaaagacgatacgaaaaggaatacagcataaagtaaatacaagcagagtgcggattgagagcacatcgatcggcgtccaattccataattgatatcatagccattcggcatcagttcgacggctgtacttacgcgacatcgcccaagtaaggatatatgctggctcgaacattccgagcattcgcccgacgaacggtggggggctttcggttgacattgtagtcagagatgttcgaaacccgatttcgccaactgcaatggatgctaagaggagaaattacaagaaaaggtttatatagttagcggaaatgccccacgtgactggggagctttgtggggtcggcgataaagtcacatacttagctgactagggctgtggtctgaagatgaccaatgaatgaatgacaatggcgtgattattccgatagataattataatctcacgatcatacatcttacgagatgaaaagtaatcaggcttaatccaacaaaattgaacatagactagtatctagcatcctggattggtgcaaattgcacaagtactcaacagatgctccggaagaaagagcggtgcctatcagtacaaagacgacggcatgtagtggtcacaaggattatcacataaaaggagattataaggaaatagcagactcagattgggagaaacgttccagaacggaatgattgaacgaaggacagagacagaacagacacagtaggagaattgagatctgtagagagcaaaaaaagaaaaagatcgtatgtgagagaaagcggaggaagttaggtgaacctattcagggggtcggagcgaagagtccagaatcaccaatgagtacatgagtctcggtttgaggtatgagggattccacgctcgtgtgaaagaagttaggttggagacactattagaagggttgctggttggacaagagacaaaataaaaggagactcgtcgtcattatctttataagtgactcgagtccgggttgaggacctgcccacaaaccctacgaacaaatgccaatctcattggatgttcagcgatggtggggtgagtgcatgcggttgaccctcgggctgtaccgactggtgcgagcaagggagccaacgtcgtgttttccgtcgcaacaggcacggacattttcaagccggtcttgctcctgggtttcgatcacttgtctcagatcatcggcactttcttggccatgaagaatttcatcgttgatactgggagattgaccgtgccgtaccttcagacttgcgatggatccccgaatcgaacttgagatggtgctgagtcttgacgaagagcgttggcgatcatcgggaacttgcaacgacgagtttggcacgggtgagctgagcgccggtgatgcacggccaccgagagtcccggaagatcgcatggacatcgccgaggccgctctccgctgttgcttggatgcatgacgagcggtgcggctattgtaagatgagaacgacagtcgtgcgttctgacgagagctagaccggaagcttggggggttgaactcgttgatgtcgtcaagggatacgctgttattgtcctcacaggtgtcgttggtctcccttagaaggaggtaagacaacgcattgaaccacgtctcatgcctctggctcgttgtagccgtaaagcgaactcgtcggccaggactgacaacctccaagctcctgcagtgaagacccggaggataggggttgtcgtcggcaaccactcgaacagcctcaatgggcacactcttggtacggagctcagtctttccggcagtttgtgggtcctgcgtactccaatacagagttcgggtatacgggtgaacccagaagtatcgtcggtgccgtgttgtggacatatccgacgagccggtcttgcgagtgtatttccaaaggaattcaccaatcatggtctgagtaatcgcctggatcatgcgcggatccgtattaggtccatagccctgaggcatggggccaacctgaggggccatattgaaacgctcctcgagctcagacgcaaaagacgagactgaggatcgtcgagacatctggctttgacttcctctcctcattctggcctgggatgaaccggttcttgaagagcttgcccgcgcagcgtgttcgcttggcgtaagtgggcgctgggagttcatgcggtaggcagaggcaggtgccaaaggaggccccatgacagacgtaggggatggcggagccacgtcgatggacttcttctcggctgctgtgatagcttcccggtgatcgaagggtagtggaggatggctggcaccagatgtctgactggctgaactgtggggccggcggtaacttggcgttgttggtttcgcagcctgaatttgcgaaaggcgaggtcgcgtcggagccttgggtggtacatgtggagttgtgatacttgcagtgactgaggcaatctcccgtgagctgtccgtcacctgactgtcggaagacagcgggcgtgcggacacgcgatccatcaggatttgatctatctgtttagaggacaggatagtctgggatccttggtccatgctcactgaactaggttgctgtctaacagagcgaggtagggcgttgccagagatatcgttcaaggccagtccagcaccagcgagctgatcactattagctgtgctagggcggctacgagtagcgccaacaggctgctctccggggaccatgatagcggccccagcctttgactctgtcggctctgtttgagtagataaatctgccaccgcagggatgacaaatggcatagacttcgctggatgagtttccacagagcgcacggaggagaatgagaattccggcgtagggacaaggcggggctttggaacaataggcttcgtatatgctggatcgaggcaagagatcgtcaagttcggtacttcgcgctcacgttcaacgtgtttgataacatcgacgtattgaatgacaggtggctcgggttcaggaacagttgcttcgactggcgtagtagattgagtggtgatcgaagagaaagtcaattcgggcacctcacgctcacgctcgacgtgcttgataacatcaacgtattcaattacaggctctgctttggcgatagttgcctgcacaggggcagtggactggttgttgatggaagagaacgtcaactcaggcacttcgcgctcgcgctcaacgtgctttataacgtcgacgtattcgataatcggctccgccttggcaagtgttgcgtgtacaggcgcagtggactgagtggtgatagaagagaagcttgcctctggcacttcgcgctcacgttcaacgtgcttaatgacatcaacgtattgaatgactggcggctgcggttcgggaacagttgcttggactggctcggtggtttgagcagtgatagaggaaaaggtcaattcaggcacctcaggctcacgttcgacgtacgtgacgataggctccggcacagcaagagttgcctggacagggacagtcgtttgattattaatggaagagaagcccaactcggggatctcgcgctcgcgctcgacgtgcttgattacgtcgacgtattttatgacgggttcaggctcaggaacagttgcctggattgcctggacaggtatcgttgactcagcggcgacagaagagaagctcaactctggtacttcacgctcgcgttcaacgtgcttgatcacatcaacgtacttgacaacaggctccggcacagcaagagttgcctgaacagggacagtggaatgattattaatggaagataatgtcaactcggggatctcgcgctcgcgctcgacgtatttgatgacgggttctggttccgcaacggttgcttggataggtactgtcgactgagcggcgacagacgacaagctcaattctggaacttcacgctcgcgttcaacctctttaattacatcgacgtacttgatgataggctctggcacagcaactgttgcttggacaggggaggttgattgagtggtgatggaggagaatgtcagctcgggcacctccggctcgcgttccacgtatttgataacctcgacatgcttgatgattggctcaggcacgagaaccgttggttgaatgggatgagatgtttgtgatgaaattgaagatatcgtcatctccggcacttccggtgcgggcaggacatgcttcaccggtgcggtggtgcccccggtgatgtatgcgacactcagatcaggccgtttaggtgcggaaggcgtggtctcttgggaagaaacgtgcgctatgcccatttcgggtagatcgggttgagcgttgacatcgtcctgctggtcttgaaccgaacgatcgcccacaagcatgttttgcggggtagaaacatttgatgggtcatcagatgagggcttgagtggagtcgcctttgtttcctcgccgatctcccggtctgtttgagttgcgtcgggtgcaagagcatgcggcagagcagctcctgcagcaataccgacagctccagcaacaatgctagtactgatagacgtgggctcccaaggttcagtcataacaccagaatccaccattgcgggcttaggtagtgcatccagcattgcatctgagggtctgcgtgagcccgatgcaggctccatgcggggtgtcgaagcctgggagtttacttcgtcatcatcaatgtcctcgagctctccaagttcggcaaagaggctctggccctcttgagctaatggcagtggcgcaaagctgggtgctgcggattcgcgtgaactcgaaggtcgactggttgatgcgaatgtggcctctccagatggacgaatacgtctcacgctacgtttagacttaacacggggtctggaggcattcctctggctcggagagtcgaacactttatcatactcttcctcatcggaagatgcggaagcagtgctgttatatgagttgcggttgcgagctttggccaggagcaggggagaaggcactcggcggcgaggagtggtctgtacgttttctgtctcggtaagatctgccgaatcgctgctgtcatccgccatgctttcgacaccagtctggaatgcttcgctctcagttgcggttgccacctcattcgctgtttcaaatccatcttccgcctcggtggctgtatggtagacgtcgctaggttcatcaggagactgcgagcgagagcggcccctagtggataacgccttggtgtgggtctcggtaggactgatttggcccgcattgtcttcccaatcggtgtcattaagctcaacaactgatttctctttgcggcctgcgcccaaaagatctgggcggggaggctttcgggacggctccgtcttcgtcttctggcgtttgctggttgcgtttaccgtagtgctctcacggcggcgttgctcaacttcatcccgagcctcttgcagcatgcgcttaagctcaatcttttcggtcttctcgcgatgaattgtgctcttaagactctggatcatgcgatgagcatggccgagcgagctcttcaatgtttccgattcaagatggccatggcgaggggtgaacttgttgggggacggtggcggagagctttcaggtgtgatctgctcgggctcattgtcctcgtcgtcatatgcaatatccctcgagttctggttttcatagtctcggagcctcatggcaacggccttggcgagttcttgattttgagaagtcatttctaagagcttcttttggagcgcggccttttccgcatcgccagaagtcaggttcctccgcaagaggtggatttccgcatcatttgccttctgcgtgaggatttgatcctcaagcagcctcgcattggtctgccttagctcctccagctctcgttccgcggcgttcttttccgaattcgacaatgtgatggtagtgttgagccgttgttcacgttccgcggcctcccttgcagctgccataaactcatgtgcttgagtctccagcgcccagttctcgtccttgtagcgttgctcactgtcgtcgagcgcccggatcctttgttcataaccctctgcctccaactcaagtctggacttttccaaattgacaaacttgagtgtctcatctcgttctgcgagaagagcttgcagttggcggacctgggccaaaagtgaagtggagatctcagtcgcaaattcgatatcgtggacacggttcgacggttgattgcgctgcttgcgggatggaacgctgactttgctaggggagtttgtggcttgactggcgaacaaagcggaatttaagggtgactatcagaactcgatgttagttcggttagagttagatgtaaacccaggcagtaccttttgatcgaaagatagcgttccaagttgagcatcctccgggcctccggcaagacgtttgggtcctaaaaacgctcgtgctgactccaagccgatctcattgtactccttttccaaatctgccagtttgcgtcgcagttccgggcccatctctccctcattctgctcctgctcaacctccttcaactgctccgagagctgccgttgctgatcgataagggccgttcctagccttgaggcctcctccagacggcgctccgtctccgccaagtgggcctcgagggcccgtttagcttgtgctggtgaagacgcattcaggctgtataactgactgtcaaagggcgagtatcgattggagtcgcgacgagcagttggccttccggaattcgcaacgaaggggtcgtccatggacgcaaatggcccggtggcctcagcgttggatgtggtcattatgtgggaatcaggggcctcgaacggcatctgaatcctcttaatgccgaggacacagttgccgttgagatatcagggactcgcggcttgatcgttgttatgattctaggccgcgggcattatccgaatcgccgcactctgtcaaagttgtcgcaagacgctttccgtggaggtctctgccgagccgaccagcgaccaaaggttgttcagggattcgggattaacacgctgatgttgatgcgatagtcgtcaaacggtacgctgttgaaagatgtggaagggaagaggggggaagcccacacgattaaaaataacaaacaccgaccttcggacgaatcagtgagctcccagtgagattggccagatacacgcgcgcagagatgcaactaaccacaacaaagtgctcgggatctgcaggacctttggaatgggccccggtctgaataaacgaaagactaagagacaaagggaaaacagaaggatagctacctaaaaaatgaagggaaaagaaggaaagggagcgtagggagtgatttgacaggtcgagtttggatgactcggcgggggagaaaagggaagagagtacggagtagagtgaacgtggtattgttatttgccaattattggcgccggcgtttgagattcacgatcgatgatcaccccatacggagagatcaatctacgatactaggctatcttgttttccctgaagggacctttggaatttactatgaaactgtaaaaacatatgaaacgctgattcgacaggttcctgcgtgtgtttggctgccattttgctatcaaacgcgtcccaaagtaaggggggtgtttgtcttgtttgcatcggtgtgcttagtcatttcatcgcctcgactttggaaatgcgccgcatctttacaacctttgcatctgacacgattgcttgatatactcgactgaccttcaccaatatacaacacacgatgggcgaagagacagaagtcgcagacgctgtcccccaagtcgctttcaagaaacgctccaagggcaaagccaactttcgcaagaagcccgccacgccacctccagcttccgactccgattccgactttatatcatcagatgacgaagaagggcggcgaatcaagaggcgacgcaagaatgcagctgtcaccgcatcatcgacaaatgcgacaaggaaacagcacacagacggacctacagcagcggttccggctccattaacctcgagcaacgatgccaccaaagcttccgactggtacgatgagaacttgagcgagaagaacctattgggcacaacccgggcaaaaccagccccctctacctcacagctagacggaagctacaagggcgccgccaactatcaatctttcatccagaagaaccccgatgcaccggggaaattcggtcctgtcaaagctgcgaccaatgttaggactattacagtcacggattatgcccccgatgtgtgcaaggattggaaacaaactggctacgtgagtcaccctcgcctgtatctatatgaatcgagactaaccatttgaattcagtgtggctttggagacagttgtaaatatctccattctcgcgaggcatacaaggcaggatgggaactggatcgagactgggaagtcaacaccaagggcaagcaattaaccgggcgagtgatttcccagcgaaaaggtgcgggcaaaatcgacgcagaagatgatgaagatgatgaggatgaattgctagagagcatcccattcgcctgcctcatctgcgtgaagccttatcaagaacctatcatcaccaaatgtgggcactacttctgtgaagcctgtgccctacagcggtaccggaagactccctcgtgtgctgcgtgcggcgaggggactggaggtgtctttaacgttgcaaaaaagttgaatactctgctgaacaaaaagcgagaacgtgcgcgcaggattcgagaagaggcgattgcaaagggggaggaggtcagcgatgaagagggtgatgatagtgattagtctctgtatagcataatattaacacaaaagcagctggactgccaccttctcattgcatattctattacaacgcaactggaaaaccagttgatcgtaataatgcgtcgtaacatctctccgtccatgcatatcatttctggggctaatgtggcaaaagtggaggtcaaggtatatagtgtatgttgtaccatgtacagtactgtgtgccaaggcttcaccattcatcatagagacagtacgacaatacgctggtcaacgtaatcaaggaataatgccgaccacgcggcatgcgacgcaaccctaacgcggacatattccgtagttccacggcaataaaaccgcgggccttttgaatggctcacgttccccgctaagttgagacttgccagtgccaagtgcagtctagttatggtgcgatacaatactccgtacatacaatcacttgcattccatcagatgcccctcgggatattccttcccattttacatgatctcactacattgcggagtatccatctctgatctcagaggtcttacaagccatattgcaatccacttgatcaagatgtgggccgtcacagccacagaaataagaacccgcatattagggccctgaatctttcagggtccattaatatatgacggtattattcaagattaatattattcgactatattcgactaattcgactatgcttccatgttccccaagtaggctgtgcatcgacaaaaaggatcaatggagccgaccactaaaggttattctggccaatttaaaatcgactgcaaccgagccccactgtcttagtctgtaagtaataatagtctgggcgccttagttccttagtatacggtctatgcccaaactggaaaaagcctgctaaatcgtcgacgccacgtgctcttccggacagaaaaacgcgttatcagggtggatgcagagggtgcaataataccgagaatggaaatgtgtacggagattcgtaagatcaactgttaagcctttcgttccgtccatggctcaagcgtaaactcgtcaaaaaggggttaagcgtaggtccaagccaagctttttggtttctccccaaacgaccaaaaaccgaaaccaaaaacccaaacgccccttggcatcagactaaaggcggctcaggggagtcaaacgccccccggtggccaatgatatggccatgacatctaaacggggtaagtccaaggagaagctcccctcttcggttctatttgactttaaatcttttcctttttgtacggggtaatctttcgtttccatttcatctgccttgactagtccccttctctttcctttattattccgcgccttcattttggatcatttttgccttcaggggtggtatttcggaataatcactccttctactccttctactccttctactcctatttcgcatcattatcatacatcgggtacatatcaatggcttagtagtgaatcctctacctcaagtcacacttactacctctccacagagggacttttaatatcttcattcattatgaaaggcggattccgtatcgcggggttttgcgttacctgcctcattctattctcaatatatctactcgaagcgcatctacaagacatctgcaatcaatatcgcgctggcgcatatgtgattcgttggctagatcgccatggcactgccccaagcccacatggcgagatcacaccgggtgataaagtgattgtgatggccaagctggaagaagagaacaccgattgggtgaaagacgagcttcctgagtgagtgcttcgatttcgcacttcgaagacccaactaattggcttgctttccaaacagctggcaacgggcaatctacactgtcaacccctcacacgagacacggctaaatcctgatgttcttacaactccattcaacaaaggccatgaagccatggcctacttcacgtacataatcgactcctaccacaatctcccctcgaccatcgcctttctccacgctcatcgcgcaggcttcctcatggcatggcacgtcgatgcgccactccacgataacgtcatagccatgcgcagtctccggtccgatttcgtccagcaaaacggctatgtcaaccttcgctgcaattggaatcccggctgcagggacgcccatcgcttcaatagtcatgtcaccgaccaggtctggttggatgtcttcgacggcacgagtacaccgcccttgaatacttcctcgtccacgcagcaggagttcgccggccagatgtatcttcgcaagccggccaagatcggtgccgcatgctgcgcgcaattcgctgtctcgcgaaatcaggttcagaggcgtccgattgaggattatatcaagttccggcaatggattatcgacacggagcttactgacgcttcgtcggggcgggttatggagttcttgtggcatatcattttcggcatgcaaggggtatagtaagttatggctggtcacattttgttataatgttgaactaacgtcttttgcagttgtcccgatgaagaattatgttattgtcaagtctacggacagtgttgattccggtcttggcttgagcattgacacctcccggaatgggatctacatatcgtggaccacgtggcgttgcacgtggcattaccttctccctaccacatcccttttacgacagtacaaacacccgctcacttgaattcggccatacatcttgtcgcatagaacttggagttttcagaagtgcttttcttatatattaattgcgttcaagcgtggaggataaggttccttatgcacatactctatcacttttaatgatggacttgaaaatcagagtacataaaatatatattcttaccattgtcttcttcatttccttgcatacatctcatccatccagactttatggcctttactaccaaagtgacttcatgctctaatatctctgcaaataacaagacactaattaccagagacagtccgaatacactgctttagatatccacccaccctctgcacgtcatcaagacaagcaacaacaccaacataaccatcaggtctaaccaccaccaatgcaccgtgtgccggatccacaccatagatactatacgcattatccaaagccgacccatcatagaaacgcatctcagcctgctgctttacacacgccggcacatccttccactcaaaagaccgatgcagccggggatgcaaaataatcagctcaacagtcgatttcggaaactgcgcttcaagcagagcgacttctttcaatgtctgtacagaaacacttctccgatcaagaaggtccgttgatgtaagacatagaatgcggaatcggccagtagaggggatatctgcggtgttatctgttagatatcatataatatcaaattccgaccacaaactccgagtcccagcgcattggcataccatcatggatatcccgctgccacccatcagcatgccgcagcaatcggacattaagcaatctccggcccggtctcaggacgccggatatgtattccgttccttggatggggtttgaacgcctgccctcaacaccatcgtctagctcgtctcggataactagcatgttctccgggtattccacgccacatccactcgtaaagccatttccgagcttgaaagcttgttggaattcttcttgtgtcagtccttcggttgcgcccatttgccctgagaacatggtggagaacttccggtcgaagtcgattagctgttgggctatctcgtgccgttctgtctggtatgtctcgagtaacggggttgggctggggccgcttggttctggtgcaagcccgttaatgtggtatatgagcttccaggctaggttgtaggagtccatcattgagacgttcatgccttggccagcctggtggatggaagttagtgattttgatgtgctcgaggaagagttgctgggagacttactttcggactatgtgtatggcaggctatacatgtgcttctgttagttcgatgctatgcactctcttcggggcaaacttaccgtctccaacaatgaaaacccgtgcaacccccttcgaatcattgacgataaactcgggcgagacacgctggccaatttgatacgcagcccaccagtcgacagcatcctccttagcacagagagagtacggcttgatcgcatcagcagcttgtttcagaatcccctcgagggtaatcttacttctccgctgtcgagcatccccagacttaccatcctctcctccatccagcatctgatccccctcttccacaacccccggaacctgaacatacaacctcgtaagatattcaccggtcgaaatcctctctctaggaataaccataacagaaccagctggagaatgaatcgcacaccgacggcgaatatccgggaaatccgtctcaacaaccacatcaaccacaccccagatatgatccaacgactctccctccagcgacagccccatacaccgccgcacaaccgaatgcgccccatccgcaccaacaacatgcttcgcgcgcaccgtcttcccaacccgaacaccatccacgatcgtcaccatactaacccgcacagggaactccgcgtccccatcctcatcaatcccaacatccacaacctccgtattccttaaaatcccacgctcagaataactcatcaaatccgtctccatgatacgctcgacacgtccctggtggatggtagcctcgtagcggaaccgcgctggcgggataatctccggcacgacggatgtgcgctcgatcactttctctggatcggatgacggattccagaatgcgaattgccacatttggcacgcttcgttctcgatttcggtggagagaccgagggttttgaggacttctagtgtgcgtggctgtaggccgtctgcttggccggttttttgagtgcttggttttgtatctatgctgaggagggaggtggaggttaggccgtagcgggagaggaggagtgttagcattaggcctgctggtccggcctgtgtttctatattagggatttgtttttgtttggatgctggatgttggatgctgtgttggtatctggggtattgtattggagagcacatacgccaaccacgactacttcatatttctcttcgtctttatcatcgcgcttgaatgggggtgctagtcggggtagtggtggtgcaaatgatggtaggactctcaagtcccgagatgaggaggaatgctcagtaaagaccggcattgctttttgggtgctagaagcagatcgttcgagaatctttagttattggaagggagaaaatggatagttatactcataaatcgggtttgatttagttggcctgttttgcctgttcttatggggtagccccgcgattctcttcgagtgggggatctttatatccgcgatttgcgcaacaactactccatacgcttgttttgattggatcaagctggcagatagtttattttgagaattcgtcggtaggagagggtggcagtttggatatatgtacagcagtagccatttggttacataggtataccattcggaatatctcatacgtccgcgaataagagcatataaacggcctttctttcgtgggaccatgtatgtgtctagtgagatgctcttttttggagaatgtcttgttgcatgtatggcatctttggtcatttaacgaagacctggatataacgaatatttactcgtgtctcaattgattcattttaaataagttttactgtagtatgtactccgtaggtgttgatcatcaagtccggaattcccccatttccccacagtacgtaccccacatccatttcgtgcatcaaatctatggttcttggtgaaaggctatgctttcattagttaattactagaagtattttgcagcaccttggataaaaatattgatctttcgaaatagctctggccataagtaaacaggaagtaagatcataactcattaatcgcgcccaaatcgcagcaaccctggatcccaccaagatgatcctaagcaaattggatcagtgtttaaagcttttgctcaaaatactgctcaactcgctctacaagatctgctttcttccctgctgtggcacgcccatgcgaatgcaagaactccttcagcacgaccatcgtaagctgaacgaggtattagtttggtcaattacccgagaggattcgaatgctcaccttggaaacagtgcctttgtcaaagcacttttttacttcatcttccactccaggggcgctgtcttcaatcttaactcgctttggtgggtggtcgctagcaggctcggtcttcgcacctcgctttaccagcgtggaggtggctgctgagccgtcaaacatctcggaggcctgcaagttaagttcctccgcccatttaagaatatagtcgccagcgcgctgtggtgaagcatacattcggtcagtgcatttccgcaatttctaagagcatggaagcagcaaccttatgaacctgtcggtacttgggcacagtcttatcatctggtgattctgggaaatcttcgtccaaggcgatagcctgtaagatacgatagtgccattgaagcgctgcaacttggtcagatcatttccaacaaatcacagtaatgaggctcacaagggttcggatattttgaagggtcgtatatagccttgggaagctgcaattggcgaataacatcccgcatggcattattcaatgcgtcccctgctcggttaatcttactatctggattttggcgcacatcatctgcgaaaggaagcgcgataatccacatcccaggtggaattttctgcacgccattctcgtcgatcttttcagctccagcaatcatagcagctaagaccggtgaggcatttctgcgggggataaaccaaaccaaagccagtttctcggaatcgagaagtttctggtgcaatgcagaaaagacccgtgtggagccaatgtaaccctcttcggagggatagataaatgaggggtgtttgacattggcccagaacggcagggctgacaagggcttgaacccaataatacggatcacagggtcaccgaagttccttagcgcctgttgttcttcaatgctgaatgaaacctgctcaccgccgaacttgtatgcctttcgaatgctagacttatcgatctcctgtccggtctcgtcggacattagagttgtgacaccttgagcaatctgagcagtctcgcccccttgccatatgaagcaactcctggcaggctcttgctttttgagcagcaaatatccattgacggatatcttgaaatcaggtccgatctcaagtggcacatttgagaacagcgatcggcggggtacggatctcgagttgatgctagacaatagagaattaagcaatgtgagtccgtcacctttaccagtcgatgcgttggtgtccggctgtaggtatgccggggcatcaccatcactgggcgatgttttgtagatgatgtcctgctgattgtgagtataccgctatacaattaggctaataacctacatcgtagaatttagaggtgtcgaattcgtgatctgattgagagatgggaaacaactcgatattgacaccaagatcgtacaagtcccttgcgcgaactgttgcggcggaccgcattgccttattgtctgcgtggggattatcgttgtcagtcacgacaaacagtcgtcgagatgagaagtttggagccttcgaggtaaagatctggtttgcgcagaacagcatattggccattgaaactggctccttcgatggttccaagatctgccgtacgtcatcgtcaccatctgctggagatgtgagggaccgtaagtgcttgacttcctgggctgatggaacatcaagatccgtgtacagataacagtggggatatgacagatcttcttggtcgtcctcattttcatcatagaacttggataatttcgttccgtagagcagaacgccaatcatatcatgagggttggagacgatgcgctgttgcatcagatggtatgcacacttcaaggctgcagacgcgggtgattcgtcgccatgtttcttaggatcaggtgatggacgaggcgtgagcatcgagctgctgatgtctatggcaaacagcaccgcatctttgactgatttgaagctctatgtaggcaacagtcaacatcggtaactatatctccggcttttgatactcacggtctggtcgagctcttcgtcctcgtaattatcctcctcgcgcgtgtagtaatcttcagccatggttgttacaaatatgagcttgacagattggaaagatcaaaaggtgtaaattaatcaaatctaaaatatcatcgagacgcgctctctgacgcggacaacacgaaagtcaggtgacgctgatgcctgaagctgctgacattctccgacggtgattggccacggccggtgggcggcgaaagctacataaccaaaaccggattcaacaaatccgaggtccaacataagctggaattgtcaattcctcctcaattaataccttcagactactttcttttgtctattccaaaatataattcatccccccaaaaccatggcattccgcagccttttcgcgatcccccgacagttattgactgagaccacatctctcggaggtcggtcggcatttagcagtcagctcagatgcaatcaacgaggtctcgcaacggtggtaccgccagtcacacaaaatgcgacaggttccaagggcccgacagctattgtttttatgaacatgggtggaccttctacaacggacgaggtggaggactttttgagcagactatttgtacgagtcataaatggctacattggccacgttgaattgatatgctaacacatgaactacaggctgacggtgatttgattcccctgggacgactccaatcgtatatcggccccctcatcgcacgtcggagaacctcgaagattcaaaagcagtacgcaagtatcggcggcggatcgcccattcggaaatggtccgagtatcaatgcgcagaaatgtgcaagttattggataagatctccccggagaccgcgccgcataaaccttatgtcgccttccgctacgctgccccattgaccgagaccatgtataagcagcttttcgccgatgggtttggcaatggcaagggaggacgtgctgtcgcgtttacacagtacccgcagtactcctgctcaacgaccggcagttcccttaacgagctgtggaagtggcgtaatcgtctcgagggaaagcgccctaatggagggtccgagccagctggcgcaatccagtggagtgtcattgaccgttggccttctcactctggtcttgtggaggcgttcgcacaaaatatcgaggctcaactcaagacatacccagaggagaagcgagaccaggtcgtgttgctgttctcggcccacagcttgcctatgagcgttgtcaaccgaggtaggctatgtccccgattactctctagaattacactaattattctctcacacaggtgatacctacccggccgaagttgcagcgacagttcatgccgttatgcaacgactcaagttcaagaacccataccgcctgtgctggcaatcacaggtcggacctagtgcgtggctcggggctcagacagctgataccgttcaagagtatgtgaaacgaggacagacggacttgatcctgattcccattgcgtttacaagcgaccacatcgagacactgtttgagctggatcaggaagtcatccatgatgccaacaacccgggtgtcaagcgcgcggagagcttgaatggaaacccggttttcatccaggcacttgccgatattgcccgcgaccacttgcaaaagggagaattgtgttctacccagatgacactgcgttgccagggctgcaccagcgagcggtgcttgggtcagaagaaattctttgccggccaggaacatgcttctatggtggtctaaccttggaagcaactaagcttacatgagtttttgtttggactagggaagtccaaccttgtatgtatacggactacgaggcgttggaggcgttgtaagagtataaaatttcggggataatgtactgtacgatatatattttcaattcttgcagggcatcttacgatatacaaaggccgtcagaatgacaccttaatatgactacatgtgcaagcccaattgcggagattccggagctaagagctgccaatgatgaaatcccgataagaattcaaggaatccaactaacattcccccctctttcgtatgagggtgatgatgtgtcgtgtctctaaatcttacaaatcaatttgttagcggtaatcttacaaagttggaatcctgcgaaatcccgaaatcaccgccaatgtcccaacttcatcatggagaacgaagaactctttgtgggggatcccgatattgcggagctgcacacagctcgagagactcgtccgattgaacatgtaaccgaaaacacgcctctaattgatgaagccgatgggctgcatcgacggtcttttgaccttacgaataatcggccgaaagggaggagagcgagtgtgagtgactgatttacgaccaaagcgtcggaaacaactgtctaatctgcaaacatgacagatttggtggctgctcccatttggtgtcctttttaccctgggttttggtggaatggctgtgcccaagatcaatttggtcatgtcgctcatctgccgagattatctcgccgagaagaccacccaagaccccggattcacctatctccctgttatatttggggataataatccacagtgccagataccgcaagttcagtcgttggttgctcagttccagctctatctcaatcttattgcgggtattctatcagccttagtgagtccccggttcgggcacttatccgatcgctacgggagaaccaaaatgatcgcgctgggcgcgatgggcgcggtactcaatgaggttatcactgtcattgtggctaaatggccagagcgggtctcggtcaatatgcttctagttggagcagtcatggatggactgggtggatcatttacaaccgcacaggctttgatccattcctatgcctctgactgcacgcccactgaaaaacgaagcgtggcattcggtctcttccacggtgctttgttctttggaattgcagctggaccaggcggtgccgcatttttgatcaagcatggaggcacgctacccgtcttctacattgcgcttgcattccatgcaactttctgtctatcggtcttcttcatcgtgcctgaatctttgtccaaggaacgacagctcgcggcccgcgagaagcatcgcttgaaaattgtggatactgactctcctaaatggtactcttggcgtgtctggaacccagtgaacttgttcactccgctttcaattctgatgcccgccgttggaaagccgagtgccttgttccccaaccgccgcggtgccagtccggctctacgccggaatatcattctgctggctgctatcgatactgctgtctttggagtcgccctgggcacggtacaggttatcatcatctacgccgaatacatgttcaactggggcagcgtggagtccagtctgtttgtagcgaccgttaatgtggtgcgagtgatcaatcttttcctggtgcttccgcttatatccatgttcttccgcaccccgtgcgtggaagacggaaacattcgcggctcggacatgctggacattgttctaatccgcacatctataatattcgatattttgggctacattggctatgctctgtccaagacaccatcaatcatggtgatttctggtgtcgtcgcctcgctaggtggcatgggttctgcaattctgcagtcatctctgaccaagcatgtgccgcatgaacgcattggacagatgctcggcgccactggtcttttgcatgctcttgctcgagttgttgcacctactgtatttaacttaatctatagtctgacggttgcaacattacctcaggtagtgtttgtggcccttgcggctgtttttggtgtagcattcctcatgagtctgctaatcaggtcgcatggtatgtttattctcccgatctcctacaagaagtatactaattactgtgacagttaccctggaggctggtccccctactgatctaagattggaagaagatgccgacgagcatgacgggcttttgcggtaatggatggttctttctttgatacaataagctgtgcttccttctaaatgttatatgtctgcttcgtagcgtcttttttgatgttctatatgattgattgaaatagaccggtctttcttattctactttgcaactctcatggatacatgactatgtaactagctgttggttatttcgtaatgaagatgctcgatgcatgctcggcagactagagccattggagaaacacacatatatcgatagacctggagtaggcatagaatatgcagcccaactttctttatcatatatccctttcctcctgatttttatatcttataggtcgacgtgaagtcatggaagttgtatgcggttagatccatgggtcgtatgacaggccggcctccggtctccggcaaccggcactggcctaacgcgcaagttgatttgcatcgggaaaaaagatgttactccgaccttaccctacgctctccgcttcaattgcctgtacacctaattttggaccatagctggtggttgaaactatttaaatctcctttgtttcagtcctctgctcgtttcggaacatcggtgcaaggccgctcatgtacgactggtgaacccgcgcgcaacccgcgctcaacatctgcaatatgcttgcccgcgccgcaaaaggcggctcgataataccttctcccaatgccctccgggtactccgccaattggctctggccggctcaacagttggcggattctgcaccgtcgcagccctcacgtacgaagcccatcgccgggtccgcatggccgagaaaatcatcgagaataaacgaacactacacagcagtgcgccgaattacgatgcaacatctgccgccaaacgactaaaggtgatggtcgaggcagcagaggcgggcgaattcatgggcattgaatccctcaaggcgaggaatcggaacgtacctgatgagccagggttcgagacagaagaccttgagcccaagcccaagcccaagcccctggtcagcttggaaaaacaccatgctcgctcaaaacgttcgctctttgggagccagtcaattgcacaatccaattacacaggaaacatcgattctccgggtttagcccagaacgctgaaattctggctcgggagaaacaacagggcgaacttgcacgagaatctggcaagctgccctttgacgccgaaattcgcaggttgttaactgaggagcgggaaatcactgctgcgaatttgttcttagcgcacactcggcagacacctaacatctcttgggaacgcagagagcttgcatgtgttatattcaccgccaactgcatcaaaggaaacctattcgttgctcgaactttattcaatcgcctggacaaagtcagtgtcgtctcggcggagatgtgggctacactgatgcatctccttgcgaaagaggggcatattgactctgtcggcgttatatatgataaattcaaaactagctttgctgttccaaaccatctgttggaggtcatcctgcgatgtctgatcgagtccaaacggttggactcggccaagttcctcttcttccagcgcttcgaggatgaccgtgactgtggcctgtgtggtgcttatcttgatggattatggcggaagaccaggagcatggaattgctgtcttcccaactcggcctcattctcaaacgcctcgaatcactcgatcgaagaccaaccgagaaacttttcaacccaatggtcaaggccatggttgaaactggccgagctgaagaagctgaagctatggtcaaggctatgccaacacactacgggactgagcctggatgccggaccattggcttgattatctacaacagagcacttaactgtgaatgggacagggtcatggatggcatgcatgctatgcacgagcatggatacacccaatcaaagaaggatttcactatgattttcgaccgtgtcttcttggaatactaccccacccacacgggccagcaaattctcgacttcgtcatctcttgtatcaacgattttgacatacaacccgacaaggtactccaccgacacattctcgaagcgatcattgaaaagggcaacgaagatatgatcgcactcattatggaaatggccgaggaacagaattggaatactggtattgacgaacggtttatcaagtcactcctgaagagccgaaaactcgcaatgaccgacaaccctgtgggcatctggcgactgaagcaagccgccaagaatcgacaagattatttaacttcttccaggcgcatccttgggactagttctgacacttgggccgtacggggtgagaaaattgccccgattcacattcccgccgaggaaactttccctcaaacggtcagcgagatggtggcatccaaaaatgctagtctatatgttccgctccacaaacggatggagcactttatcaacatgggcagacacaccgatgccctggccatttaccatcacgcatccactggcggtttcgtagtcaggccacttcatctgaagctggctgtgatcgccgcgattctcagttgcaaaaagacaggcttggcgaacgcgcgacgtctaattacatctgaatgggattactggaagaatatgccttctctccggcatagtaagcgttttacttcgtggattcccatcttcttccaacgggtcatggaggtagacccagaagccattgggtatggaggcttgatcaaaatggccatttttgaatattacgatgtttgtgccaacaccaagggtcttttggtgaagcacttttgtgctacgtcttccagccgttacctcattgggggtggaacgccagaccttgccgtcgatctcctcacaacaatctatcaatctcggtggcggatctctcatggcttcgaccaggtactattgaagatgttgctgcgtgggtttgccaaggtccataactttaagggggtctggtggtgcataatgacagtcctctcgcggaatgagcctctcaatcaagactttgtcgtggaagccacctctcagctgggccccctagaaagtgcgatcagatccgatggctcctacgatgctgcggggcaagttttggtactccggcagatcgtgggggcactggaggccaaacttgaaggtgattcgcattggtcaaccattaatgttcacccggagttgaaaaggttgaagcgttccaagccattcaaactcactgagcaacaacatctcctgcccaccacagacctaggggagctcatcatgaactttgacgaagagtgggagttggatctgttgcttaagcgcaagcagttcgacgctcctgatcatgcaaagtggtgggctgagtccaacgtcacaaactcgaataccgtgccttcagaagatcccgagtacccgtggaacaatccagcgcattggggtgcgcattacgtgccggagaagtactcgtccgactatcacctggagttttcacttggaggggaatacgatgagtatatggagtatgaagattatcaggggcaccgggcgtcccaatgaacatgtataatagtgtaaatagtatatgtacaatagccatcctcaatagattcataaatatatgcctgtataccgtcgtatatccaaatcagtccactcggagcgattactaccgtggtgtctccttctgcgtagaattggaaaggcggagagaggtcatccagtgaggctttcacatgtcacgccaccacccacccctttctcaaacatcagcccataaacacaggccaatcgactttcctttaaatcaattgcctaggccgataatggtcctgcctcagtcgactccgttctgacattatctactcttccaaacccaaaatggcatccgtgctcaaagacgacgcttccctctccacggccgctcaacgccgcatcgacaaccacgaagctgatgttgtaatcgtcggcgctggagtcctgggctgtgcgcttgctgtcgcactgggaaaacaagggcgcagtgtgatcctgctggaaaaatcgttggaggagcccaaccgcattgtcggtgaactactccagccgggaggtgttcaggcgctcgagcaactagggctacgggattgtctggacgatattgatggcattgatgtgaaaggatactgggtttcatactttggcgagccggtgctcctcgaataccccaagtctagcccaacctcgcctacaccgttaggacgagctttccatcatggtcggttcgtgatgaaactacgggcagccgctttgtcttgtcccaatgtcacagtggttgaaaccaaggtgactggcctcatcatatcgccagataccgaggaagtccgtggagttgagtgtatgaccaaggatgtcaaagatagctacctcggccaactcacggtggccgccgacggctacaactcggatttccgcaagcaacaccaccaatacacacccacgcggcgatcaaagttctatggcttggagctcattgatgcgaaactccccgcgcctaacactggtcatgtcctcctcagcgataacccacccgtgctcatgtaccagatcggcactcacgagacccgaatccttatcgatatccccgataactttcctctggcctcgctgcagaacggtggtgtcaagggctacatgcgaaacaacatcctgcctcagctcccagagggtgcccagaagccgttctccgacgcgctagagcagggccagttacggtcaatgccgaactccttcctgcctgccgcggtaaacaagacacccggcttgatgattctgggagatgcgctcaacatgcggcaccctctcacgggtggaggcatgacggtggcgctcaacgatgtctgtctcatccgcgaattgctcagcccagagcgcgcgcccgacctctccaatacaggccttgtcctcgaacagctcgcggaattccactggagacgaaagtcttcttcttcagtcatcaatatcctcgcgcaggctctctatgcgctcttcgctgcagacagtatgtattctgactctttggttaattccagtaactaattgtttctatagatcaatacctccgagctcttcagcgtggctgtttccgctacttccaggttggaccagtaggcggccccgttgggctgttggccggtctgatcaagaaacctctggtccttgtcagccacttcttctccgtcgccttcctctccatctgggttctcctctgtgatacccctccgctcaagctaatcctagccccctactacgccttcatgatattgtacacagcctctgtcgtgattttcccatacatctggaccgagatctggtactgatctggcttggattcatcaattggtgttctactttcctcaaaagcgacaatgggggtactatcgtaacctgtggaatatatcgtcgatattacccgccaagtctttgtttaatatcccatcttcaccctgtgtcttttcttccacgccttatgtcatttaatcttgtccagcattttcccactgcatctgatacattgcaggatttgtgttacagatttactgtactatatactatatgtcataccattatttcaatgatagatgatacgatgtcaatatatccggaacattccaataatcaacgctttctatgctacataaacatacaaagaaaagaaccccaaccgattcacaagattcacaccctccatagcccacctcccttacttccgatgcccatacaccaggaaacaccaaacccaaacctaaccctcacaacaacttcacacaaagcgaatatgccaaaaccccaaaacaaaacgaaaacgaaaacgcaaagaagttaggtgcaacaggcacaggggtctggtccacacgcccaaaccaaggcagcgcaccaacgccaggcagctggagacccgaccaattccaatcccaggaaagaaaagacatgacggcactggctgagcggatggcgcaattatgtacgaaggagatgctggaatacacctcgcagattaggctgtaggcgagaaaaaagcaatagtataaatacagcattaaggaaatgaatatcatccacatctttttgttttcttttactttttctttttcctttctcttttttaggtgggattgctgttgggttgggatgtgtcctttaggtatgtatgtgtgtatgcaagcggattcttggtgtttgtggtttatcgtggattgtagagcggatgggttgctctgcacggtgttgttcttgtgggtccaggtaggagagaacgaggatgagcacgacgaagggaagagagagagagaggatctgagaattgaatctaagaggctagactttccatttcctccctttgttctctaggtctttgttattcgcagcccggtctcccatttacagacactgttgactgacagcaagccagaaggacaagaaaaagagttagaaatcggaagagaagacaatgcaatccaggaagtatcaaatacatgacctgagcaggaaaaagaagactttttcgaaaattttggtttgtttctcattggcaacaagttaatatctttctcttttgtacaaaaccaggaccgaaaaagaaaaaaaaaattggcataagaaaatgaaaagcatcagacacaaaaccgggtctaaccattgaacacaaagaactccgaacaactggaaagaaatcgtctcaatgcatgggaggcgtttcctggaaaatgaaccggccaactttcccgatggcaacgaatgcatgcatatatgggccctagtccctcggtgacggggaaaggggtggaaaaaaaagagcaaaataatgtatttcgggggaacgtaagttcgtttgggggatactgcgcggaacggaaatttgaaagcaataaaatcatttttgagacgtgagtatctgctcattcctcgtggacgtgctggagatgattacggaggcgcaacgacgcaaacctagtcaaccgccttttcgcaaagaatcatctgctgcaataagctcattaccgccgttgatcccgtttcgaggctccattgatgacttggtgttcttgcggttcttcttcttggtcgtctgccatccataagcgatctcgttcgtgccgttagactgtccgcctgatcttcggggcgagtctgtgtgtcgatctttggtgcccggagtagaattgtgagagccatcgtgtcggccttggcctttgggcttgctcttgccgttaacaccgtttgccttgtcggaatggtcgccattagtccggcgcttcgagttcgtcgattgatgtcgattctcattcgacccggatgcagcaggtttctcgcccatctgtcccgagtgcttaggctggccgatttcctttcctgacccttgtgccgcaccattccttactcggtccggacttgtcttcgcgggttgctgtaccaggttttcggaatttgataggtggtagttctgcagcctactggcgagaagctcagactggccattcatgtcggactggttttccccgttcacaccattgaccttttgcgtttccgtagatggccgcgtgaagacagccgaatgctccaagtcaaaggatccggagtcctgataatcttgagacaaggaatcggagaaacttgcaggtgtgttcatgttgtgatcatctgacgaggtataatggctcaccgccgagtaagggtccatcaagtcagacccatacgccgagcgaggctcactgggacgcaccgatccatccacaatcagcggacctggtgcaactggacgtggggcggattgggtagcttgcgacgggggcttgggaactggaatgtgctccgagtgagcagtgtccgacgagaacgatcccggtcgataatctggctgaagaggaataaacgaatatccattcgagaccagacccatctgtgcggataatggcggcagcatggaaccttgctgcagggcttgaagctgttgtggggttatataataacccaccacatctggctgccggttatcatccacagaggttgagtgggatccattgctggccagactgtttgagcgcattacattctcatcaccactcccttctccgccttctgacgactcggtggccgacctttgttttgaccagttatccgtgggtggcggcatggtataaagtgggatatagccgggaagagagggtgagccctgaggccgtgcaggttgtgaatgcgcacgaagagactttggggatccgttcgcagttgacaatcgccgagaattacgacgagtatcaggaatagcactaacagcagacggtgagggagggttggtgatagtcgcttgcgagccagatgcaccaactgaagcataggtggggttataaatcgtttgatgtcgttgggttgggctgagagtagcatgactcgcggttcctgttcctgacctcgggcatgagttttcctctggaaactcttggggttggggaactgggaattggataaatggctgacggatgaagactggcggtggtctcccagtaatcaatgcctggctatgcaattgcatccgcaattcttgctcctgtgcctgcaaaagctggatttgttggtataactggtcatgcagaagatattgtgcttgctgttgtgcgtgcagggagatatcggttgcattgctagtattcgactgccggaagttcgacttgtttgcggtattcgactgtcgtcgcccgccagtgagcccgccgcgcgagaattgattattatatctgccgccgcggttccctccccgtccaccccgcgatggaagggagggtgtgagagttggccgcggttggggtggtggtcgttcccaggtccgctcttcttctgctgggaattcaaactgctgacaacatccttctagatcaccgtttgcgatatattcgaaggcccttcgcaattccaaatgcaatccccggaacgacgtgtcgtcggcggtgtttcctaggttccttgacgtgttgaacggctcctccacgcacagtcggttgttcaacatcaggtgccagcccttggcctctttgttgatcagggtgccgtcccgtactgagatgacgttcttctcatagtcaaattgatagccataataccggaaaaacccaaagagcaactcgccaaccgattgcttgttcttgcgaccaaattgacacaaggtcttcaggtcatcatcgaacgagcagaccaatccatcgtgagtcaccctcttcttgtgcggacgtgcttgcaaacttgggagaactgggggattccttgtctgcagaaagttaatgatcaaacagatccaggtataagaactaagggttccaccaagtgctgcatcattgagggttctttgctttgtccagtgcttgatcgtcattgccaaaggccgcactctctcatccacctcgacataggtccgaatcatccgagtgttttctagcgccaaggtattattgacattcatgtcacaggctaaacggagctccgggtcccaaatcttcacgatggggacctttgcatgcgacacacacaccacccgttccatcccatctgtttaggtcagtctattattcagtcaagttgtatcaacgcgatcccttacgtttggccaacacctcggccaacaggcacacatgttccaattccttgtagctggttgtgatgcaaatgtccactgcgcaagttgttagttatcgccttttatttctcttgtgcccaaaaaaagagaagaacctaccatccgagtcacttgaacagagcttattccccgacgagccaaaaatgttcgccttaatattatgattcggccattgctcattgaaaagcttctccaatttccgcacaagttgtcgtcgtcgatcatcactctcagcagacggtaacaatcgatcatacagatccatgatatcggtcgacaattttttctcctcgtccggactgagctgctccttcaatgcccctttctcctccggtaatatatctgctccgagactatacggtacccgtcgtcgaaagaatgccatggcggtctcatatttacatcctccaagcggtttccgggagaatgggggtaggtgtgtggcttcggagtgggtcgatcgaggggaggtgtttccgtgggcgggggacggcgaccgagaatggaaggagaggttgcgcgcatgttggtatggggtagaaggaagggaattcgactggtgcgaagtcaacggaggccgagcggcgggttcgggcacgtcagagtgttgcacattggattgcgatctccatgccatcgtggagggctgtgccgacgctagcgaggcgacgtcacggtgaagggaacactttgcattcccatcgatttttgcgaccatatagcaattcacaactcccacaccgttgtggtccttccgtacgggggctcggcaaaagagataagagtccactcccacacaccacacaatataatccgctcagtttccgctctggaaatgactggagaaatttcggcgatggataaattcgagcgaggtaggttatggcacgtgtgtaacaagtcaagggttcgttgatatggtgagacagccgggaagcagatcgtttgtggtgggagacaatcgccctcgaccaaagtcgcgaagagccgagtttttttttcctttcacgcgggaccgaagaaaatcgaagagatgtaaaaagacaatgcctcaaccaggagatgaaaataagacacgacaggcgaatagtcaaaaaaaaaaagggtcttcgagagcgagaagagagcgcaggtttcgaggattgggatcaaagaaaagcgacaaaaaaggaccaagatacaggatgcaacatacaatccgtgtgccctttcagtgaatttgtaggaaccagcctgggtttccgattgttgaggaaaggaagcgtagccagagaggggaatttgcggaagttgtgaagatgatcgaagccctggaggtcagcccctgtcggcggtaaagaagacactcccgaccgttccttaaagaactccaatctttccaacgtccacgattttatgtatagcagtcgagcaatcggaggaatgtattcagggccagtgtttgcaacttggaacagatgttggtgagtgggaaattagcttataacgtatgacggagtagcccacggagagcgactatcggggaatagttctctgccctcatttcttaaacaattaggggctgacttcggtcctttgtctctgatataatctctcgctaatatatttcttactagcactctttgttctttttcccccgagcccagaaacttgaagccctgaagcacagaaagccaatgcagagttgcccgcggtatcaccgagctatgcattcatgcaggtaccatgacgacagattattgataacccggtgtatttgttgagcctcttggactactagctattgactgaacatggcaattcctaagagaagccttatatgctccatatgtcgtactttctcctttttgcctcctgatcgtcgttcttcacttctccccgcgatcagcatggtccttgcacgtgctgctagtataagctaatccatgtcagtggcctgaggcataaatatgacatagatactccgtatgcttcagaagtaactatgttgtggaatctaagattctgtaacatacatcctcggtgactcaagagcactcaatcatacttcttctttgtttgggaaatgaatccaccatggacccataattcactccggaatctgacagtggctgcccgtattataagacttgagcggatgaaccttgcgagataatagccattggatattgttctggggctaaccgaagagttgatcgtcagatggtagcctttgtctacaggactgggtatcgccacattgggaatgtgaggcttgttttggcgtgtttctttgtaaaactatctacccctcttcaagactgactgaacatctagttatcaagattcaagacagctccagcttgcgacttataacgtgaccttcataaaatcaagcatccggcttgtatgactaggaccagattcggccgagagcagttgcatgtatgacgagtgggaagttactacgcttccgcagggtaacgcggaggcatgcttgcgcgtatcgtctagttgtaagttgtatctttccggagggtttaaagaaaagtgctgatgctgtagcgtctgctggatcaacctatacagacaacagggcagagttgaaggaaccgataactcgactgcactatcaaacgcaaatccctctcctactctatatcttttgagtacctcggtacctgcaatatcccgctataaagtcgattcaccccgattccacgtatagaaatggtcccatgtacatgcggggaagactcgggctgctgactggctcgtcaagccggctgagtacatacatgaacatcgcagcggccaatccaactcagaggggcgcggaccttgcggaagaatatacgaagtaaaaaatgatggccgtcggacgttgccccacctctcctgaattgaccgagttggtcaaagcacgttcaaagtgtattctggaagcggcaatgtactgactagtattgcattacatctaccccatgtgtacggagtaggtattgtttctactagtatatctttcaatggggacttttaacggacctgcttcaaccatatgtatacgaggctctctaaatgagcaggctacagcaggctacatcagcctacagcggactatacccattacatgcgtttgttctgcgcactttccatggagctgcagatcaaattccagatgcgactagagtgttcacttgcagcctccgatggcgtccataggcagagagttcttggcaagctgactgcatagtgcagagcctttgcagattccaaggttagcatcatcatacgttgactccagggaattccttgtttggaccgggttgtattgtgaagataatcttagaacaacttggaaagttgaatctttgaatattgtactgaaatggagtataaagacgtagggcatacaagggcaacacaatgtcaatgtccacgtttttaacggtttccaagattcgagcattaaccttcaataagatatagcatcaagtatactccgtacagacagtaatagttggataataagtaatcgtaactatcagacacgaggaagctcgacgcttagcccccgtgtccccgtccaatctccggtgaccggccccatcagtgacgaatagaagcccttcggttgccgggaattgccgcgtacttgggatcttcgatgtacaggaaaaagaagggaattgctcaggtgaatggaagtggaagcattgaatgacaaatacggggattgtcgatgttcagtcgaatgtgcagagacttgggtatatactccgtccagacggagtactccgtataccgttgtaaacataagatactaacaaaagaacttggataagtatctaacatgtgttgtcctactttcagaataaataaaaagaaaaataacaatctcctatttgcccccgtatactgtcgctatgtaactattttcctctttggcaaggcaatttatgaaaagaccccctccccccataaggtaatacacacccacccccccataggaccctctctctctctccttttctcttcttcatccttccaatttttggactttctctgcctcgttcactcgtggtagaaagaaatactcggaggcttatttgctgtaagtgccatgattctatttcgatttccaggctgggattttttcttctataccctatataccccattgaagatactttgaaagagcgcggaaaaaacaccctcgaacggttttaccgagcccggggtaaaaataaaaaaaatatctcaaatttcgagtgtttcttttttatgtgttgaaagaagatctggagaattgtttgaaaagtgtgtgttgtggatcgacgctcacatttttttactcgacagatcgcctctgaccggatcaatctcccccctcccctgaacagtcgcaccctccggtccttttgatctcgacaatgtcttcgtactacgaacctcagggctggcaagcacccgctgcgcgccaggtctcttgggagcagccggcgcctccctcccggtcaggtatgggatcaaacgccgaggacccccggcaaaaactgacattcgacaacaggatcgagttcggtctcgcagcgcgaggatcttccggccttttcctcccaatttgacggtacggacacacttctgcttgaatctctacaattgcttatccggaagccgaatcgcataatgggggataaagttgttgattttgaagcgaggcgattgtggagattacctgggcatactttttttggggggcacccttttggagacaagtgctgatactttttttttaactttatagaggtcgatcgtgcgatcgacaatctcgtcaagagcgggaagttgtggaatgctcctcggcgggattcgatgcccatgatgatgggccggccctaccccgactacggtatgttgcgggcacggatggcacccagaacgcgtttctgacttgtctcttgacagaccctcgtatgggtggtggccctcagcgacaccattcgatcagcgagttcgatggcaaccgtatgcccccggcgggcaatgcccagggtttctatgcctcccagcggtaccagggtcgtcccaacgaggtggaacagatgatgcaggcgaagcgtcggatggcagcacagcgtgagagggaactccgcaactatcaccaggagcaacagtacaaccgaagtacgtggtagcctctgtcttcttctttttgagcctcgttatattcccccgtcggctttttcttctctctcttttcacttccttgcatctatgtatccggcctgtgtaatatatttggtttggctgcttcgcttttcttttgaacacggggttttaatacttttcttcttcctttcaaggcctcctcgccgagatgtctgcatccaaatccgaccgatccaccagcccagctgccgtgagcgaggacagccgtcgcgaactcctcgcccgccagcaccgcgctctgtacggcaacgaaagcccagccttcttcccgcccggtgccttctccgatgataacccacgcccggatagccaagccggcggtggcaccccgtcgtccgccggtgtccgtggatcctccccgcgaggcatggacccattcggcctgacacaggccggcgctactggcaccgatgccaccacgggcctgcagtcgccctcgcgcgccaacagcacctcctcgcctagctccgctattaacgctagtttcggcggtgagcagcccgtaacctcggcttcgtcgcccggcgcagactctccctcccgccaggcctcttccaagcccgctggtcctattggcaccgtcggtcctatcggttcccgtcctgctcccggccagacatctgcaccccctgccaatcaagccttgaacaagcgctccatcacccctctcccctccccacttgggctcggcttcactcccgctgatcctactgctgggcccgctactgagcgcacctcctccgccggtccttccccggctgtggcctctgcagccggtgcccctggcaccaaggaccaggccggtggtgttggcctcggctggagcaacggcagtggcgtctggagctccaagagcggactgggcgtgcaagcttccgtttggggatagatatccacttttgatgacattactccaagtgggcgcttgttgcatattggactagggttgtgctggcttaccatgtacttggcaggggagaaaagggacagggtttaccgggttttggaagtggtgttggatctgtctggatgatatgatgtctgcttcgctttctcctgtgaggtctcgggttcagcatgtttttgttctgcttttttgtttgttttgctatgtcggtgcccgtgcgaatatggtcggaaatatggcgctttatctgtgatgctcgtgggctatgtatgggctgtctcatttttctcggtgtttttcatgtcggatgcacaggtctctttcttcatctttctttcttttttatattctggggtgatggtacgggaaacttgcacattgtgactttattttaatgcctgttttttttttttttttactatatatctctatatggagatgggaggcgaaccgaggctcaaaacggatatttattggatttggatattcgacttctacttgtcttttctttttttcttcccccttctctctagagtgggtgaggtttgattatacggttactggagtctgtctactttgtcctcaacgggttttggcctcgtttcgacgtgatcaggaagcgaatgttgtgtctttacatacctattgaattctcattcattgccggcgtcttgtcctgtacaggtgtgtaggttcggcactatatgtctctggcctcacggcacggtatatatgtaactagtcatgtcttctatttagggcttctcatctcgcaatctggtagtgatttgtcttgccatgctacactgatatatatctctattctagcttagtttaatcctactacctctaccaggggttcaatgttgtttctagagtacgctgacgagataactagatactcgaatagagggtaaattgtattttattcccgaataaagattggtagtttaattccaacaagatagatgtagcaattgtcgagataattaagcattagtcgaaagcacgtaaacaagatcgtctttttcttgacaggcatctaacgcagcacacaacatagaatctagaagatcttcggtcacatctatgatccccacaaagatgataaaaagaaaaagcaacgaggatatccaccgggattcacactcaaacagcgctggtattcaccgtgggagtgtgttttgaggtgtcgtcgggggtttgagtttgatcctgaaattcggcagcggtagggatgacatgcacgatcttcctcttggcagtgaagagaccgacaacaccacgctcctggttagctccaagccagggcttgcgggcttcactcaagaccttctgggccaggaaatagatcagctggccgatgataatcagcacaaaggcaatcgggtacatccagtggatatgataatggaagaccttgacgccaatgatcacaccccagaagttcatggtgagcatggagacgttgaagaaagccgccgacgagagacggaacaacagcggagcgagacagtagaacatactcagacacagcgtgtacccggtgagatatccaccgacctttccgttccagtgcgcattgtggaaggaggtccggtcgaagatgccggcctgcgcgccgttgataatcattccgaagaatgacatctgcccgagcacctcgtacactggccgagtgctgacgaagtactcttcgcccgtgttggtgaggccatagaaggacgcggctagcagcgcgaacatgtcgcctttcagctggttgccttgggatatgtctccgccgttcgtgccggtgatgtggtctgagccgatgaggacgcccattccgccgatacaaagcaagataccaattatttgagcgatgtggtagcgcacacccagaaacaggaatgagatgacgacgaccacgacgatggcccagaagttgatcagttgcgcgcttagcatggttgtgtattggtatgccagcacaatgaagtagttgccttccacgtcacagaaagcaaggatgatgtctgcagcggttagtcgttgtatattggatatgtgggaggggaaactggggcatacatttccagccgtcacggtataccagtcggagccagcccttgaagccgtaacggtacatcgtataaggagtaaagataacgttgagtagcacatagtttatgaaggtctggaacgcagggattgcccattgttcctcgccgagtagcgttgtgaaggtacccgtcgaggtattggcaatagcgagaatttgactaggagcatttgggttagggtttgagggttgagctgcagtgtttgaactggttcttaccctagaagcacggtaatatagaattctttagtcttaaagtagccaaaagctcctttcttctgatcgaccagatccgcaggttgcacagggcactcggaggcttccacctgggaactcgaactttgtgcacccgtttgagcatccttagccagtgaattggtagagctgccatgttcgacaccagatgcctggacggtgatttggtccttcgactcagacatgatggactgatgcgagctcaaaaagcggggttatttttgaatgcagtggcaaaccagttgcagattgaagcaacgtagcaagaaaagggagctttatgaaaatgaaacgagcgcaaaactccctaagtcgctcgcggattgatatcccggttgaggttgatttagatgaagaagcagaaatctcaaaagcaacccgcctaagaggaaaaaacgtctggaacctttcccgatcgggccatcgtcgataagaaacttccacgctgttaagcacagccaatcagcgggaggatagtggggacggtgagggtctgtgctgcggacagggccgtccatctggtcttgttatgtcagcagcttcaagcaaggtggctggtacttggcgggtactgggagagacaggctaagcatcagcctggccgaagtaccttccgtgtaacctacatagcttgtggagatccatgcgttgagttgaccttgcagagcatatttatagatttatagattgatggatgaatcttaaattatattactccgtacgggctttctattgtacacgagtcagaccctgttaactataaataccttatgacatcttgactgacgccattccgaaacccctgagagagaacattgaatggattccccagctctgccgatcacggaagaacaccagaatcacggagatcaagtagtctcgatttagcataagctgcattccaagtggtatcgcatatttctgccgcgtgtgcacaataccataggtacctggtgcccggtacctctatagtcggacgttgttagaaatatttaggtaccttaggtacctacgtcgatgatagagatgaaatagggataaacagggagcatagggaatcctggaagacccggaagttcccactctctcttcacatcctccaaagtagcttcttgcgaaactcccggggtctttaaggggaaaacaagttcccatattccaagtacctgccgaggccgtcaggtggaccaggactgtttccgatcgtcatcccctccgcagactctttcatcattgggatctccacctccattccctctttgcgtctgtttcaagccctttccaaacaacccgtacacaatcctccgataaccttcttttaatttcattccgttccccacccccaactgccctttggctctcctctcgcgccggtgcacttttatcaggcccggagtgacgagacgcctttccctgttcttgccggaccatggcgctggaattacagccgcccgacggtcgccgacgagtgaaggtttatgaactaagagataatgattggtttgaccgaggaaccggcttctgcacgggtcagatcttaggagtgagttgtcgcgtgttgtgcgcgtaccggggacgtgcgatgtttcatcgcgcgcaatcccgagcgcatcaccaccatcgtcagtagctgattgctttggactaggaggaacctcgcatatttgtcgaatctgaagacgtgcctaatcgcgtcctgctcgagacgcggatcaccaagaacgagggctatcaaaaacaacagggtacctatcccgccattatcggctcatcgctgttggagatcttttttgactaactgtcacgcgatccagagactttgattgtttggaccgagcagaatggcacggatatggcgctgagcttccaagaggcggaaggctgtgcggtcatctggtgaggaatcaacaaaaatctttgcgcgcatcagctaaccacgtcgaagggattttgtcaatgccgtccaacaacatctcttgactctcacttcagctggtaaggtttgtcgcgtgtttggaagctggcatctctaattgttttctaagatgacgctttgtccgacgacctcgataactaccagtccatcgtattaccgacccccgaacttggaaacctccccgaaatcgaacagattgtacgagctgcgagcatgacacagggcggtcgggatgcgctatccaaatacatcattcgcgacgagtacatcgccaaattagtaccgctagtgacaatggctgaggatctggagagcttgatcgatttgcatcggttgtgcaacatcatgaaatctctcatcttgctcaatgacaacaccatcatcgaaaccgtcgtcgccgatcatgtcatcctcggagtggtcggggctctggaatgtacgctttacccggcttcaccctggcgaatacaattgatactgacgaaaacagatgaccctgaattccctacacataaagcgaaccatcgacaatacctcgcagacaaatcgcgatacaaggaagtcgtaccgatcaaggacccgatcattcgccgcaagattcggagtacatggaggctgcaatatctaaaagatgtggtattggctcggattttggacgacccgacgttttcagtgctcaattctctcatattcttcaatcaaatggagattgtgaatcatattcaaggaaacgggccctttctgcgagacctctttcaagttttcgacccgagaaatccggaccagaggcgcaaggacgacgccgtgcagtttcttcaccaatgtgcttccatcgcgaaaaacttgcaggcgccgtcgcgggcccaattattcgccaattttatcaaccatggcttgttcgccgtgatagcgttcgccatcaagcacttgaatccagctatgcgcacgactggtattgatatcttagtgattttgttggagcacgacccagtcatgatgaggggctatatgctcaaggccgtcaacgagaaaaagacgccactaacagacaccttgatcgaccttcttcatgtggaggccgaccttggcgtcaagaaccaacttgctgatgctatcaaggttctccttgatcctcagattcccatgcaggacccgcttggtcgggctggacccgattacttcaaacttcgcactaacagccttttatctgatgcatttgtccagcaacattttgacgagtcctcaaagcggcttttccaaccgcttaaacagcttgcaaatcgcacagcccgtacgtggtgaggtcttctgttttggtccagaatttgctaatctcgagtctagttaatgatttgacattccaagaggtcaccctctattcgcatcttgttgaaatcctcaccttttttgtccgccaacacctcttccgcacacgtaactctatacagagtgaatctcttgccccccgcgttgcacagcttctgcgggcaccccagaaacacctcaaactcggttagtatacatcttttccccagaagccatagctaatacagacgacagtcgccctcaaattcttccgcaccctgatcagcctccaagataccttctaccaagctctcatgacacacaataacacatttgagttgattctcgacatcgtctacgagacaatgcctcgcgacaacttgctcaactcggcctgtcttgaactttttgagttcatcagacgggaaaacatcaagccttttatcctccatgtggtggaaaaatatcgcgagaagctcgagaacattatttatgttgataccttccagagcctaattcttcgatatgaccagatgcagggttacggagccgaagccgatgcgacactgttcagtcaggatgaaagtaacgctccgcggagaattcctctcaatggccagcgctggcagggtgcaagagagatggaccccgcggaagaggattatttcaacacgtccgatgatgaagatgaggtaggtagtagcacttggattgagacaatttgagaatacgactgacaagacaagatgaagtgggcacagaaccgtgtggctactgcggatgaacctccaagcggatccgcctctgcggttgtcaaacctttggttgactacccagatgacgacgaggaggacatcatggacaccaaacctgaaggggcagggcaacagccagtggtcggtccaaccgagacttccaccgaggttcctgcatcaccacccacacagaaccctccggagcgacttgcagagaaacgtcgccgtgaggaagaagatgatgatgagcttagcaagcttaccgcgggacctaaacgaagaagttcaacgagcagcaattctggcgcctttaacatgaatcggaaaaagagtttatctgccggatcactgacagataagaatgcctcaccgggtgtattaaataatgtcaccagcgcggcgcctaagagaatcgccatcaacattggatcaacggccaaaccgcccatttcagaaactgacacaacccgcacagaggtgacgagcgagatttacgagaaggagaatcgtgacgatagtcagggtaacgagggtggatgaatacctcataagccaggcgttttgaattaagtatcctttttcatgacctaaataccacatttggttgcgggatttcccatgtttcatctcttgctgttctttgggcgatgcccatgccccttcttcttgctccttttctttcttcggggtatccctcatctgttttccagtggtcttgtcttctctggcctgaactagcgtctagttgaatgttgtacatggcatggcgtctgggcaatgcattggatctagccttgcggtgtctattctttttattttcctggtcgggcttagatatcgaccggtggaggaccatgcatccgcggatggagtcgttgcagtatcctgccattttcatggtgttcgttacctggaattatcttctagtgccgtagatacggcctgcacacctaccactatcaaaatacccatagagcccgggattatctctctccgtggttctttttctttttccttttctgctttctttataaacgtatcatatattttcgggtggtcgaggggctagcattggtggttctactccatagatgtagagtgcctggatccaccagccaaatccgacttcacctccccatcaatcctgcgcgattcattcaacgaccccggagtaatcatatacacaaagaatacatagaaaagggtacaattcgtgtaattatactccttcaattgtcttatattatctatctggacaatcactaaccgaggccagaccacccaacgaccccgtagccatctatataccctggataagagcgcgctacagcagattccatgagacaagccgaacaaaaatggcatccgaaattacctcaaatacctttctcaccaccacaggttctccatcagacccaaagacgacaatcttcttcatctccggcaacccgggtctgatcggctactaccacccattcctctctctactttcgaagtatctaggcgaggaagaggaaaattcaccaagcttacaatcattccaaatctacggctcatctctcagcggctttgagattgacgaacaccagccctcgccgccaccgaacaatggcgttgatctcgatctagaaggtcagatacgctttgtccagggaaagctcgctgccctaatgggagaccaaagaagcggcaatggtaacggtaaagctaccgtggatgctggagctagacagaaagtcatcctgatcggacactccgttggcgcatatatcgccatggaaatcctaagacgacaccgcgaagcgagcccagaaagcaccttcgatatcatcggcggagcaatgctcttcccgactgtcaaggatatcgctgcgtcgccttcaggacagaaattgacggtacataatacgcctcttgccagatgcttgtgcttttcttttccttcgcttgttgctaatcccggctcggttacgtagactctactttcaatcattccccgtcttgcggtggtggtcagtctcttcgtccgactacttacattcctgctcccgacatcgcttcttcgatatgtggtccggctcgtcatgaacgatccccctgctcatgctttggacgctacgtgtgcttttctgaagagtcgcggtggggtacgacaagctttgtatgtgtgatattctttcttgctatgtttaggctttatctaattactcttcgtcggctgctagacatatggctgctgatgaaatgcggactatcacttcggataaatggagtgatgatgtctggggcgctgcatcggcgcgtgagcctatcgcaaagctgtttttctattttggtcgtaatgatcactgggtggctgatcagacgagggatgacattgttgcggtgcgtgggcggaagggaggacaggctgggccgactatggttgtttgtgaagagggtttgccacatgctttctgtttgagtaagtggatttcaatcgactttgactacgatatgtagctttgctgacagtttatagaacacagtgatgtgatggcacgaaaagtggcggggatgattgggcagattgtggcttgagggagaggctatggcttttacaatctatgcatagaatagacaggaactacataaagacaatgaatttcgcctttggcgcagattgtaacgggtatctcaagagacgctacgccacgcccattcccatcagaatgaaaaagagcccaaagctattcaaatatacaataaatcataaagctagacgccatgtacaaatgattgacggccgaaggaatgttcagcactctattgcccctgcccctgcccattgctgttgccttgttgagctagccctgctctccggaataaatctcctagcacatcggactgcggctgcggtgggggagtaggatggtgaggcaccatgtgttgatagctggattgctgtgggtattgctgcgggtgctgattggggcctagatggtgtgcgcgcacactccaagaatcgtcctgggcgcgctgctgaccaaacatgtcttgcagcgaaatatgacgtcccataggcaccccagtttgtagttcctccatcggaggtgcctgtgtggaagccgccattgctgcggcgtgcaagctagtctggcgcatagcctcgagacgttcgcgagctagcttcatgctctcccccgcgtgggtggcgcactcgagaatcatctgggcatttatggtgcgactctccgcggtggagtttggcggcggctctgagtagatccagagaccgtagatgcgcacgttgtttgtgccggtttggttcttggacaaattctgggggtgcaaggggtcggcgatgccattttgtccagcttcgccttcggcactttcttcggctttgagaatcacatattcctctgtaatttcgacattctccccctcggtgagagggagatcgaagttgtccaacccgcggcggtttaccacgaaggcagtatagcgatcttcgcctagctcaccctgtgtttcctgacacacaaacagggttccttcgactccgttcttttcccattgttttgtcgtggggctgaagatgtaaacaactgcgtagggggcgagtgagaggatggaggtcactgagggcttatggcggcggataacagagaggttgagctcttcgttcgagcggagcgggggtgcaggttgttgctgcatgtcggagtagtatggggcgtcagattcattatcggtgaggttgacaggattgtgattgttctgtctccgcggtttgcgtgcagtcatattttctgttggaacccttggaattgtgcacgatggaaggagctggggcatatcgtcatggcagctccgccttcgcgcttatccggcgtctctctactttctactttctctctactctctacttgcgcctcttctcttttgaacctcatgtaaggtaattgggtactggcatatatttgattcctttctgattggtctcggcatatctccttccctaaatttcgcgtgatgaggatccgatccttctaaaccttggtgggatgacacctgatgaaatgagccattgtcgcattatacaaccaattcgctcaattcgctcaattccttctatttatcctatggtactcattaccgcttcgttcttctactgcaacaacactcataccctattttcccttgccggaattaaggaccgcgcaagcgcacacattcatacatacatcacgctacatactgctaccccactgaacctccaaccatagccaagcgaggcaaagaagctttatattgtgatttcacagacaatcacacaccatgagtcctaaatcgcaaccgtcatccgcatcagagcacaagagccacgaggccgaatacacggaagaaattaagaagtcaggactcgacgttctgtcactttcacgcgcgatcagagcaaggaaagccgagtacacacgccggagatcgatccgagtcaaggtcggcacgtggaatgtagccggcatctccgacaccgagaaggacgttggaaggtggtttgttcagggagaaggggtgtgcccgaagttctctgggacaaactacgcgcacgagccagaatccgattcgcccagcaagcccgacgagccaaaatcagacagcgataaaaaagtaacttttcactacagtcccgaggaggtagacctgtacgtcttgggcttgcaggaagtggtcgatatctcttctccaacagaagcgttccggccatatgttgacctcacaccgtccaagcggtggaaggaagctgtggaaaaagcgctacccgggggatataagctagtatctgaagtccagctggtcggcttgttgcttctgatatatgtgtcgcccgccattggagacagtgttgcttctgtcagtagtacatctgtcggtacgggactgatggggtacatgggaaacaaaggcgctgtggcaacgcgcattgtcctgggcgaaaccacccgtttggtctttatcaactgtcatctcgcagctgggtctgacaaaggcagcttggagagacgcaactgggactcttctcagattgtccagcgtgctagatttgacgcggtttggcccgaggatgacggatcgggcgaatcgggcgaagcaataggagatgaagatttcactttctggtttggtgaccttaactaccgcctcgatgatatcactggcgacgatgtgcgccaagtcctctctcgacataccgccaatcagtacgacaaagagcgccaagaaaagatgtcttcaagcccttctggctctacggccgattctgatgatgattcgccttcctcttcttcttcttcttcttctccggacgaggagacggagtcagtcactgcaactgtcaccgaacctgtcaccgacgaacagattgaccctcataatgaccccgcgtctcttcaaactacaattgcctcacttatcccgcacgatcaacttaaacttcagcaaagaaaaggatcggctttccacaagggttggcgggaaggtcatatcactttcttgccgacgtataaatacgacgttgggagtgtggccatgtttgatacgagcgagaagcagcgcgctcccagctggtgtgatcggattctgtttcgtagccagcgggataagctgagacatgagaagctcgatcaggaagcggaggaggcccgaaagagggacgaggagatgaaggcaaggggactggacaaggctgttgccgatgataacgtcttgtttgattatgaccctgatgaagacggtgcgaacagcgaggagtacatatcggacgaggatcaagccgctgatgatgatgatgatgcaagcacaattgcatcgctcgactcttgctatgatttaatccgcttggaccattacgtgtcacaccaaggcattctgtcgtctgaccacaagcctctggatgctacctttaccttgagttttgatgcagtcaatcgcgatctgaaatcaaaggtgcatcaagaagtggcccgtgaattagacaaggccgagaatgaagctcggcccgatcttactattgtggtggatagacatagtgaccataagcgcccagagaaagatcctgacaccgtcgatttcggggatattgccttcgatgtgccagctcatcggtccctaactattgccaacaccagcggcaccccggcaactttttcatttgcggagcggcataaagttgtcgacgagacaattacacaaacagcctcgtggcttgttgtgcgtgtctgcaagtctgcagacatcgccccagacaccggcccatcgatggcttcttcgtctgagagccacactctgctccctggtgaagtagcgaatatcgatgtcacggcttacgttcgcaacatcgaacacgtccgattgcttaatattggaaaggtgaatctagaagacatccttgtcctccatgtcgatggcggccgtgaccactttatccctgttcagggccgttggctacccacctgcttcggttgcagtgttgacgagttgacccgcatgccagaagcgggtgctcgaagcttggccgaatcaaaaaccccacacccatccatcacagatacttccacggaaatccgcctgtcggcaccccgcgagcttttccgactgaccgaggcgatatccgagctgacagagcgcgctgttgcagagtggagcatgacaaacggtgaatccgaggagcataaagctccatgggcaacggatctttccgggggagcctggcctttccagcctgatacatggactctaaaggacccacaggagcgtgctaagctgcgaaattccgtgcgtgaagctcttgacaccaacaaatccctcagctcaatatttgcccctgagatatcctctcttcatcggttggaggtcctatctgaaaccctcctcactttcctcaactcgctccaagacggcatcgtcacggcgaaagtatggcaagacatggagcagcagatagctgcgcgggagaaaagcaaatcccctcctcgaaactgggaagaaagccagtcctgggtgcttgagcacctggcctactcaccagcgcacagcgtatcattcacgtttgtcacttttatgctcgcccgcatagccaatgaagtggctccagtatcggccggtacgccgttgatcccattatccaagcaaaagaacaacgccacccccaataaaccgatagataagcaggccggggctgcaagccagaatcaagcccagtctcctactccagcttccgctactgccttcataaccagcggcagtttccgccgcaagaaccgcacctcgagcacatccaccagcaccagccctgaccccccacctcagaaccattcaatagcacgccgtcaagcagtcgagactgctctagcgtctgtctttgcacttgtgcttatttctgcctctgctccgatgccgtctaaagagaaagagcgtcgtatatctgaagagcggaggcgatcgatcattgagccattcttaaagatggttggggtagatgatcgaggtccatctgggggccggtattgattttttccgaaccccgtcatgttttgactcccatagacttggcttttgaagttgttagattccatcacgttgtctcgatgtgtataatgctgtattgaggccatgtcttcacgttttcctctagagatcaatgatacaggctgggcaagcaatttgaactaaagtcaattttcctatcctacagtccatgataaattatgctccggaagtgcttaagttaatacatgcacgccaatatactgatcgctcggtcatcaccccaatacccctcactaaatactatgcagtcaacaagaaaacaaaataaaagtccatgcatatccccatcaccccccatccccattcctcacctcagaccgccgctgcgacaccagcccaccaccctgccgatatacaccggatgacccagccctagccttccccttcgacgatttagacttcgatctctgctgcggcgcaggcttccgcccgatcagcatccgcttcgccccaagccaacactccgagaccgcacgcccaggcaaaccgaccagcgacagcgcaatccgagcagggacgacgacgcacgcgcaagcccagtccagcaagacgagcgcatagtttggacgacgagactcggccgaccgcgtcgcagcagccgccagcgcaagcgcgtcgccggcctgtgtctcgaggcgcacgaagcgctgatcagtctgcagggagaagagggcggatcgtttctcgtagcgacggacggcgcggttgagggcttcgatgtcgggctggatagcttttcgggtttcgagggctgcgttggcgaccagggctggggagatctggggttggtcttgttcttgtactttttgggaggggtctttggtgtttggttttgtggcgagacgggcggttgctgtctctgcgacgtgggcttcgagctcttcgaggcgtttgactaggtcttggagggttgttggggttatgattgggtctgttgcggatgatacgatgcgttggaggtggagggtgcgcttttggattagtcttaggaggtgggagactggacggacttcggaggctaggaggaagatggttaggttgtagtttgatactaggccctcggagggtcgggagagactggagcggatagcgtggaggagaccggtgccgactagagggaatatgaagcaggtggctagagcgatgagctcgtggatctggagctcggagatggctgttgctgcatccttgtgttgttcttggtcgtcgagctcgaatgggggatcgccgggcgctggaaatccactttcttcgtgtcggatggcctgggccgagcgataccagtccctttatatagttcatattagtactttgtttggggagattgtgggggagggggggccataccaaggtaaccggacagaccagttgaggaatatagcggccaagactagtattgtgacgtcggtgacgaacgaactaccttcatggaagaaaatgcctgctattgcgggcagcagggccaggcctagcggtgcagaatgccaatgcgattcttctgtcgagagtgtgccatggcctttttctacacggggtagaaacaagtcgtcggtcgatgagcggatagagttgcgggcctccgagagcgtgtccgagagggttgagttccgtcgttgattttcctcaaaggtacgggcgcgacgtatgttcaagggccgctgagtgggtgcatccgccatgttgtttctgaggttgggaaaaggaacatgtgtgtctcttacttacaccatacggcctggagagtatgggatacaatgccgaggatgatgcaatgaggcccgacactccagggctttgacttgaccatcgaagaacatttgaataactgcatataaatatgtaggtagacttcctaatagtcaacatgaatatctcgcattttatatatcttttcctatatgattctatattttggcggctaacacccataagagactataaacaagacacctgagaccaagactactcttgttactagctatgtagcttgggaactatgccatatctaaatagtagactattcagtaacgagatatagacgcattttaactatttctattgttgcagtgtcatttattgttagccgagggtcatcctctacggactagacgcatcaactctctcacacctttaaaatctggtcaatcttctaatttccccaacctgatagactagacagtctagatcaattatgaatcattcatctcccatgccgaagtcaaaaataacaggcggatcagaatgaataaactccctgccctttcgggtctattgacacccaaatccggactggggtgcctcacactattcgctcaaccacaacaccccagacgatgggcttcgaatttctttattcggctcctttcatcttctttattctccttattgcaatttgttcagtctaattcaaagctaattcaatggacaggtttctttgcttgttgcagaatatgtcaaggcctggtacccccggccgtgggttttgcttctgcagcccatacctttctctgaatagtacatgagtttgctcaatacacgatgtcttgagctatgaatcaacctcctgattctcactattcggatctcaataagaaatcgctgtcaatcacctcccctggctgagtatacttcatcgagagaggatggttccaatccattcttctttctttcatactatctcttagtctccttgatcattttgcaagagaactggagttccagactatctacatattctttttaatctctgttttacatctgccgtcatggatattcaccacagatacccgcaggccgtggctctaccaattctatctattttctccattgctctcgctattccgccattaattctgcatggaaagaaccgaaatttccctgctactagtctgatattctggtcaatcctcctcaacttgttcaacatcatcaattctctcatatggcccacggacgacgtggcgtcgtggtgggatggagctggtctctgtgatatcgaggtcaagtttatggctgccggctacgtgggcatcccaggaagcctggcatgcatctttcgaagtcttgcaatcgtactggatacagaccgggccacattagtcccgagcagaggtcaacgctggcgcaaccagtgcatggagattctgttctgcgttgctgttccagtcaccgcaatgatcacacatatcatctggcagaagagccgatacttgctatttgccatctcgggatgtgtgaacaacttcgacgagagctgggttagtctcgtctttgcatggatctggccgccgattatctgcctcattgcagcatattattgctgtaagtatactcccaactcacttcaaaaacactccattaaccaaatatcacaggcctggtcctcatccgcgtacacaagtaccgaagcgacttcgcaaacatcctccgcgcctccagcagcaacctcagcaaatcccgcttcctccgtctcttcttcctggccctatcaatgcttgtctgcatcctcccacttcaaggctacgtcgtctacaccgacatcatcctctccctcccctggcacagctactcctggagcagaatccacaacggagaatggaacaccatcaccaaagtccccatcgacggcacagtcttcttcgaccgctggacccccgtcgcatcaggcttcatgatcttcatcttcttcggcttcggccgcgacgcaacccgcatgtaccgcacagtcttctggtacctcggactgggctactgcttcccgagcatcgagcccccaaccgatacgcacaactccggcccttcagcggcgcacgcctcaacagcaaccacgctcgtcggcagcatcggctcccgtgcgaaatcaatgttctcgcgacagaaggaatccttcgctacgtttgtctcgacgcatggcacatacaacgatatcgaaaagggctcttcctcgcccttgtcccgttataccaggtctaccaggaactcgcgctggaatagcttgccctggtcgctctttaacagacgccagactcgtcaggatatagatgggacgctgctgaatgacctccccgttggtacttcgctgactgtatcctcgaatgcttgggctagtcgtcgtgatagccgggatctgtctagtggacctagttcgcctaagcttagtaaggatttcattcatgtgcgccaggttattagccagcagagcgaggtcaggattcaggtctagtgggcttgttcttcttctggttgtatctcggcttgcagtggtttcattacggtttgctcatcttgcgtttgcgttggtctgggtcatgggatctgttgtctagcagagttttacttaagtatcataatacataatttgatttgcgcagttgtgccccacacagaaaggtagaagagttcagcgaaggcgtagtccccgggttggtggtaggccgggatagatcctgtctgtggcttatatttcgctggtataaagtgaaataagtcacaacttgaatctacgaaggccaatattttgagaccaagaatcgagatttagcatactaagtctacatcacacgctaccaaaatcaaatcatccactagaaaacaaaatgtatccagggtattgtacatattatcacaccgcaaaggaggattcaatcaatctcaccagccacgaaatataactagcaacatattcagattgatcgagccccaatcaagccatttactgagactcgtcggagtgaccggagttatcgggccgcttaaggacctcgagagtgcctagaagaatgttagatcgaacccttttctctcttgctctgggaggctaggagcagatccagtaaacgagagatcgacatacgctgcacaatgttcagagtggaccggttttgaccctcggaatcttcccaagtggacatcttagcatcaccttcgacgtacaggagggttctgcgggagaaagttagctcatctgcatcaagctaaaagcttaaatagctgcattggcgcaagttgacaggaaattgagcagggtaaccccataacccaacctctgctcaaccacatgacatgaaagagtaacgtctcatccgaaagcgcgtcgcttgaccgccaaatcacctatcatatgttcaaccaggcccgcgttgcagatcatcatgcagccttcaagcgcaagctctcgctctcgctcgcgatccgcatagactgcacacgcagacccaaactcaaacgacaagatatagcaaacacacgacgaaaaagacgcaatccaagcatgcagccgcacaagccagaaaagtatcacgagtagccacttaccccttctgcaagccaaggatgaaatcgcgctggccgccctcggggacgaagtttacgatgcgccaccagctggtctgacggttctcgcggttgccgtgggaagtggcaatggtgtatttgatgatctcctggccggaggaggtggcatggagctcgggctctgcgccgaggcggccagtgagggtcaggcgggcgatggcccagttgggcgaggtgctgaaggtgcgggcgtaccgggggatgctggccaggctcatgctcaggttcgggcgcagggaagagatgaaggtagacatggttggatggaggacgtgtgaattatggtttatggtaaggatggattcattggatttgttttggcgtgtgaacgttgttgaccataacacgtgatgtgtacatgggctaccgctttcagatgtgatatagtggcagaaggcactattaggctggctatcaggattattattggttattatggtttgaatcagggattttggttgcaattgagatatcctgtagattgaaataagtgctccatatttatttggtgaagctcataagctcatgcgagagagctatagctagctctaccccggaattgccccttgtgcagggttctatctacgggtgcagacagctagttataagcatcagaattagaaatccaacgtctcgccttggatgtcccgagtcaaaaggaaaaagaaagcaaggacaagcaagcaaagaaatgcaaatcaaacgacgggcctaactctattattttgaaatccttcataacgccatgtgaatgccaacagggtataatatttttagcccggtcacgtcagtccatcgcatccgactctcccgaaaactatatggatttccgcgtattccgtataggtacaattgtacaattgtacaacatgcaattgtacaccgtcagcagcactaaagtggaaaaagcagccgataggcagatcagccaggggcagatcccagcggagatgctgcaccgctgctgattgactgaaccagaccgagataaattaagatagctgttgtctcagatgcactccttacatggtcaattagcggcccaaccacgtcgccgcagatggggcctttggagtcaacaatggttaacatggctaacacggccgacatttgcaggacaataagattggtcaagtcgacggtcaaagtcaaattgattcggctcaaacctggaaggtcaatcgccaaattagctgaatcgatagatcggctacaggcaaagcgcggcgccacccgaactgagagccctggagtctgctgctgctgctgctggggggtttttggttcaccgcgaactggcgacgtgagtataaatgacggtgaatttgctcagaagggatgatctgacagctcactcgaattgaaaatgcagatcccagtgtgttgttcaacttaaaggaagcaaaaatcagaaattaaaaaaaacaatagtcccatcgagggcccgcaataacatgtcgtttcatggttggaatctccaatactatccacaccagggacaattaagccacagtatggagacatgaggatattctctctctctctttggtccgtgccagtgatgctagtccaagtcaatccaagctaatccaagttagtccaagttcgtccttgctagatcggctaattccacgatcggtggaggcaaagtagatagctcagcttcgatatacgatcgcgtggcttgtaattttattatcctctcagattccttgaattcatgctggggctccctcagctgtaaactcaaatatgaaagccctgttccattcatccttacgcgttttggtttatatgtaggggaggcttagggttgtctccgttggtcctttttttcttcttcctccttaccctacaatgtgtccctgaccgacgtcaattaattctcttttttatttttaattattaatatttgtctattccttttgtctgtattaatttcacgcgccgtgtgactgacaccgcgggatatgtgaaaggcgtgcaggccttagaatacccaaggacatttgcatttcgcttcagaaactggagtcaagatgcggtggtcttttatattcgtcttaatagtgtccctgtttctactagggacattggcagcgccagcttcgcccgcgggacgacgcaatgttgcattcgccaacttggaggtcagacaggaaaaggaaacggattctacaaagacagatgctgccagtgagactacgacggcaacacaaacagatacatcaaaaacaacaaccgaggcatcaacatctgtcgaaactacaacgacaggcgctactacctcgagtactgactcgactactacaacgcatgcgacaacgcatgccacaacaacgacttctgccgcttctgctacctccactgtaccttcgctcgacggagcaactgaatcttctcaacaggaagcagcagactccagtaggccgacctactccggtggtctgccaatcaaaccagtgatcacgccggcatggggtgttgggggagttatacttattgccctcggggctgttctggctttcattggtgtccggcaacaatggtatttaagctacgattctttgatgacaatagcattttctaacaaagaaaagggtccaaatcttcctctcaaccggatttcttagcgcattgggagttaccgtaagttctatactcgaaaatagcaaagagcaaaaactaaccaactcgcatacaggtccttattatctatgtgatgagcccaccggtcagcaatgctgtacagggcggttacctcgtcgctgtcttcttcaccggcgttgtgttcggtgctttatcgctcgtcttcagagagatatgcgagggactgggctgtcttctgggcggtttctgcctgagcatgtggttccttgccttgaaatccggcggccttgtaaccgaaagtggctccagggtcggtatgatcattgcctttactgtaggtttctactgcctgtcattcagccattatacccgatcatacgggttgatcggttgcacatcattcgccggtgcaactgccttagtccttggaatcgattgctttagcagagctgggttgaaggagttctggttatacaactggagtaagtctaacaatttttcccaactgttgatagttgctgacagacccagacttgaaccaaaatgtcttccctcttaacacggacacttaccccgtgacacgtggtattcgtgttgagctcgccgtgactatcattatcgctgttctaggagtaatctcccagatcagactttggaatctcatcaaggagcgcagaaccaaggaagaagaatcccgcctggaacacactcgaaagatcgaagaagaagatctcgaaatcggtcgccgactcgaggagaagaatatccaagaacgtgctgaatgggaactcatttacggaaccggcaaagccgccgatggcaaaaccgcctcggtttcggagactgctgttgatgactcgcgacggggctcggaggcgtttgagtcctctgacaacgacagggagggtgagatcgagctcaaggaaatctcgagccccgatgcttccggtagtggttctgatggagagaagaaccgccagggtgaaaacggtactcgcgaacttgaggctgtgcctgaggaggattcatcccaacagggtcaatcacaagatgcagaggaaaagggcgtcgagcaagagggtcgatctgaagaaaaggtgccgagacctaccacacctgttatgactcatatccttggtgagggcaatgatgagtcctctgagatcggtgctgagatcggctcagaggtcggcacgccgcgctcgaaacggttctccggcagagaaatgttgaaccggatgtcttggcggctcagcaatggtgttatgacgacttcacagtcgcaggagaatctggtggctcatgatgatgccagctcttctgtcctgggggttgtggatgatctccatgagatgagcgtcggctgtccgagtgttctatcggatgcggatgttcacgagcaaacgcgcgaaattagagccgagttatctccagagaaggactcggcaggtgtggacatcaagtcaaaatccggctcacaagccatccaagatgctggactccatgtcgatacagccatatcccaggatgccgagaaagtgaccaccgaagaagtcgatactagcgacactgttcagcaggtgtctcccgtcgagagcactgttattgccaacagtccccttgagaattctggaatttccgaagtgtcggagaagccacaatcgccagaaacccccgcaacagatgttcaagcagacattccagatgcctcaaagaagatcggggaagtcaagcccaaacctacattggagcagtcacctatgaatgatgcagaagtggaaaatgtggaggccaatgaagatcaacctcctactgctaaaaccatcaaggccgagtctattcctgagtcgaaggctgcatctttgcccgagcccaaggttgagccaaagatcaaagtaatcaaaaaactagatgcgtcaagcatcaagcacatccccgagcaaacatcacgagtgatccattcgtaccggacgaacgaatgggccaagcatctcgcagatgcggacacccctgagatggagccgcttgagttcgaacctgaacccgaggcagaagcctcagaggaagttcgcgagactgcagcatttgtcgatgtaggcggtcttctccagacgcctcttactgcacaaccaccaccaatcgtgaacagacctgaatttgatgatatggacaatcaacaaccatacatctcatcgacaccctcaccagatattccccgatcaaagacacggacaggcacgcaaggtctcagcaaagcgaatccaagtctaacccggaacgattcgacagcttcggtcaatatgctaccatcagcttttaatcctttcataacccaagaaccgggattgacgtcgatgcgctgcgcatcgactcccctgttgacagtcactactcccaacgagcccaaagaagcagagccatcatcacgctggaacgggccacctccccttctcgcaatccgcgagaacatggtccgaaaccgcatgtcctcaacatccaaccgcttcgatccctgggccgcacgcaacttatcccgacagtctctacctgatatggcacccctcgtctccccagtagcaccagtatcaccgccgctctccatcccggaagaaaaggagatagaacccgaacccaacgaggatgacatcccactttccaaacggcgcgccctgctacagcgccagacaatgcggtcttcatctgcattaagcattgagaatctccaggctgcccagtcccctatgtatcccccggcagaacccgccggcgagctgaagcggtctgcttcaagaatggcagcgtggcgacaatcggtccgcgaggaaatcacccaaaagcgaaatcctttggccatgcagtccccgcccctcagcccagctggtccccccgaccaacggcgcacatggagctctgtgcagcagatgcgcgaggcttcgtctgctcagctgggcaatgccatcgcagacggcatgcagcgtggcaacatgacggatctgcaccgacaggcaatgcgacgtatgcaggcctcagcaaatcgaaagctgtagtacctatggttcattcatttttctcaataccccttgatttggttcttttttaccaagcgttgttattacacgccatggcgaatgtgtgtttcctacgactttatgaagtatttattgcatcaatgtctataatcttatttgataatgtatatctttgcccaattcgcgccatgcaagtaatacggcctcaccgagcactgccgagacttggtctgaattgaaatgcagttcgtcatatcgcagtgcatggtgactactagggttcctattggcttttaaggggaatcggtcgtagcctatagaataggatgaagactatgactctacggagtaataagtcggaagatcttatggccaatttccgttggtaataagagctaagaggaccaaagtccctaacggtccttatgcactgcgatagtcatccctaatagtgcaatagtacgtctattagcgtttgctagagtgtgcatactaccaataaaggccgagatgaaacaagggacggtggattcatcacagtgaaaccgggggcaaacgacttgcatatcaattattatattattggacgtatatccctttcgagtctctgtcattttgatataagatataagatgcaagatccttcttcaagtctgaattccggtttctgtctatttagccagagtcgagactcatatacgccaagctagctgcttctataagatttacaaggattttgtctcaaatttcacctacaaattcaaaccttctttcttttccctaattcttttctaatatcatttctcacactcattttgctgtatgtccacatagggcactgttctcttggccgatctccatctccgctccagtttcccccctctcctttctcccctcaaaacggcgtccttaatagtccccagacctctgtcgagggaggaagaagcatactgttacccacgtggccaacaattcataaaccggcctccaaccaatcgcgcctccgtggagtcaactccgtcattcgttcgcgcccagcggcgacagtgcgttccgatctcaggcccgccgtcgctcctccgcccaccagcagtccgactcgcaaacccagtcaaccacgtcccacgaataacccccataaccgtccgcccccaacaatccgacgagagtctcccactcagcttcgaccactcacgcgacgtccaccccctcctcagcgtcccagagcgacgccgctcccgcctaagcccatccccgaacagcctactcgtcgagcgcagccagggggaaacagaaagtggccggacgagcattgccctgccccgacgacaccgtcgcagcgaagagttcacagaaatgacggccgcgttcgcgggcagcgcagcgcgcgaaacagagaacctgcgccctcccgaagctgtccacctcacacagagcggcacccgacagaacgaccgtttccgctacacccagtcacaaacttccttccactcccagtcccagtcccagtcccagatcgcttccgtcccgtcgcatactgggtacccgcatgccgatgtcgctgaggagctcgcctggggccctgctcacccctgttttccgcatattaatccccatgtgcctctcgggtcgcgggagtacctcacaacgcgcgtgattcgcatccggcgagattggatgatcaagggtgatttggcgccgacattttcgaatttgtatcccgagatccttgatccgttgttgtcggagcaggagtttcgccgggttatctctaccgtcaatgatggtgttatcaaggcgtttgatccgttcagttttcggaattggttcgatagcacgatgggtttgttgacgggctgggtatgggatgatatcaatgcccccgcgaccaaaagccagttgcagcgtgtcgaggcttggttggagaattggaaccgcgaggtcggtgccaaagatggtgttcatatctggagcttgaggcggacggcctatatgtcgcttgatatccagattcccgatcccaaggttggcattgtacccagtgaagccccttcagctgctaataccaggccgagtactggtattggggctggctcttgatggtgtcgggctgcaggcgccgttttgcttttgctttctgattgtacatctttgtgatttgttcctttactgggatctctgcatgatatccatcccgcgcgacactgaatctttcgctatatacctttcgtctttggagtccgaggttttccttttaatatttctgtgatctgatccctttctttcatatctcttctgtcagcttcatctacatatccctgattcccctggggggctactttaccctgatttcgaactgtcatcttgaccatacatctttgtccatatccggctgtcatactgcattgtcacctctagacttgctaatcctgagaaagaactaactacattgcggatttctctccgccttaatgctccctccacgttgatgttcaataggagtagagcagcccatggtccatacaatactcgtacattgagcgtttatgcaagtcagtgttcgctttgcctgcaaaacattctatggtaggttcatgcaccatcgtgatacttcatacattaggcaaaaatatcacactacaaacaagcatatcttcaagctcaaacccaattacagtccaatattcctaaattgtcgacaccgaggatagcagaaaagatccctccttcctagactcaacgcttacctcttcagccaactaaaaatgggtgattgagaagcccagtaattgattcccgatcttccggacgttcctgcaacgtcgaccaaagaaaatctgcaagcttctcagtattgtctttaccaaaatcagccggtaatctctcgctaatgtaaatggcaaatttttcattgccgtactcaaataggctgcgcatgagagacctcaaattcccatgaacctcgtcaatcgtgcagccaaaatattctaccgggaagagtggctcgtttgtagcaagctgaaatatctgcacttgatggttagatcatggtaggagttaaggatgggatagattaccaaacaccctagagcccatatgtccaccttttcattccacgaatggggttgaattaactcgggtgccctcgacgccattggcgtgacaggaagaatatcatgatgtatgttccatatagctatggtaatagtcaataatcgacattctcgcatcactaaaagggttcagacctccgcccatatcaccaatcttgactataagtgtcgagaaggccgcatcgtctagcattccacggggccgctgcgagctcataagataccgcggagcactgtcatccacttcaactcctggaagccaattgacatgactaaattcgggttcttctatcatttcgctcgataagttgcagttcagggtgaacaggatattggctggttggaggtctgttcataaatcaatattatcgtcttggtcatttagtcccgaggatacataccgccatgaataaggccctggtcgtgaagataattcaacccgagcaatatctgtttcgaaacctcacgaacataacctgggcagcgtggtttttcccgaacagtcattgctccaccatctgatatcatgactgggaacacgagacaaatatgtaagccattaggccctttgtgctcaaagtgatctaatagttgcaaaacgtggtttctccctggatggtgtgtatctactttcgataagtgaaggaggatagaacgttctcggctgctacttgggatatccgctttgagaatcttcaacgtaatatatcttccaagcctaggcacaggaaggagtaagcttgatagtcgcgggcaaaatagaaaaatgaggtgaatacaaccttgtatcttccgcaatccaaactgtggaaaactggccgaatgcccattttgcaacaatccgatacctgtggtggaaagtgtcctcgaggtgaactgggtggtagcctccgatacgatactcttcaataggttcgacaacattgtgaatgcgttcgaagcgacgcattttcctcaatataatttattcgtacaaggcacgtctgtgtcgctgggaaaacgtcggtgtggaaagcaaggaatcaatttgatatctacataatcagcagcaaataggaggcacgagaggtgggtaaccctagggcacccaatcaacttgtagctcgtacatggcactttcattataaacagcagaagcacaactgaatttccccagtaaagaaatgtgtcactagtctaaggtagtctcttcaaggcttcctggcccttctcattcaaatccggatactgccttagattacacaaatccctccaaaatgccttaatgccttggcatcttcatgtccctcgtcatgtacgcctaagcgctcttgcaacaactttttccattcgacatccataactgtaaatccgaaagaggctgcgacatattcataccagataggaagataggcagcgtactcccagtcgagtatattaacgacctttccatcctggatcatgatgttgcccaaattgagatcgcaatgagtgaggacatacggctcgcatttcggtcggcgcttctttaagttatccaacactttgagcggtagatggtgaaggtcaaggctaagagcatcccagagttcttggtcggagtgaaacggcccatgcggttcaagattgaagaatagtaaagtgggaataacatgggctatgatcgacacattcgatggagggtgatatgacagatcgaagctgcttacgcacttcaacaacttgatccgcaatagccactttttggggcttcgataacgaaggccatgcctcctcaagtgtttggccgcgtatgcgttcggtcataacaaagtatcggccatcgtgatcgacccaatcgcgcagaacctttggaactgggatatcggtatgggttgccaggtaattcaagattttgacttcaacttttgcttttagaccctcatccgggcggtctttcaaaatcacatcagaaccgatggtccaaacgccccgttgagatgcaccgtagaaaagtttaaggtggctagagtaatggcactgtttttgtttggtggatgtccagccgcacgcaatgcaggcctcgacgaatgtttcacccattagagttggaggttcaacgggggtgatttgttataggtggaatttgatcgaggatgggagatggaagagggaccgatttttcaaaagcgaaggccttcctatgaagtaatcaacaccgtttctaaggctcaactttgagataatcgaggtcttgaaaaaagaaaataattggtggaagccgtgggcatggccgtcaaggccgattttgctattaagattcgctctgcccacgcgtatctatttcactggtttctaagcctcgtcgaaaccaaaagagcggatcagtatgtaggcagttttgagaatggaatcagactattcattgatgcagtacaggctgaaagttggttccagtagaggtttcgtgcgttccctaatgagcagcaaaccgaagtttttagatggcagaggaacagttacctatgtctctctccccttacatatgaaatagccattaactagttagttatagtgagctggttagttatcgctaactatataggtagttatggttgtcaagtagttacacaagtagtcaagtaagtggcacctccttttatacctcgggcggtgtcgatccaccccacccctgtttccgcagctctccaactcctatcaggagcagcaactcgactcactaaaacattatgctctcggggatcctcatatttaaccagaagggcgaaaacctcatttttcgcgccttccgtagcgattgccgcccgcgtttagccgacatcttccgcatccaagtcatctccaatccccaggtgcgctcgccgatcctgaccttgggctcgacgacctttagccatgtcaagcacgagaacatctacttggtagctgtgaccaagagcaatgccaatgccgcgctgattttcgagttcctctaccggctggtcatgctgggcaagagctatttcgggaagctcgatgaggaggccgtgaagaacaacttcgtcctgatttacgaactgctcgatggtatgtggaaaaggctcaatgttctagaaacggagcctaacaattggtgatacagaaattctcgacttcggatacccccagaacaccgatccagataccctgaaaatgtacatcacaaccgaaggcgtcaaatcggccatcaccaactccccatcagactccgcccgaattacccaacaagcaacaggcgcgctctcctggcgccgctccgacataaaataccgcaaaaacgaagccttcgtcgacgtaatcgaagatgtcaacctcctgatgtccgccacaggcaccgtcctccgcgccgacgtcaacggccagatcgtcatgcgcgcctacctgaccggcaccccagaatgcaaattcggcctgaacgaccgcctcctcctagacaccggtgagacctctagcaacatgaacaacccaggcggcggcaacggagtcagcacctcaaagacaacgcgcgccgcggcaggctccgtcacgctggaagactgccagttccaccagtgcgtgaagctgggccgatttgacgcggaccgcatcatctccttcgtgccgccggatggcgagttcgagctgatgcgctaccgcgccaccgagaacgtcaacctgcccttcaaggtgcacccgattgtgcgcgagatcggtaccacaaaggtcgagtacagcgtcgccatcaaggcgaactacagctccaagctcttcgctacgaatgtggttattcgtatccccacgccgcttaatactgccaagactacggagcgcacgagccagggccgcgccaagtatgaaccagagcagaacaatatcgtctggaagattgcccgcttctccggacagtcggagtatgtgcttaatgctgaggcaacgcttacgactatgacgcaccagaaggcttggagtcgtccgccgttgagtctttcgtttagtttgcttatgtttacctcttcgggtctgctggtgcgctatcttaaggtctttgagaagagtaattacagctctgtcaagtgggtgcgctatatgactcgcgcagggagttatgagattcggtatgtgtttatcttttcgctggtcatggttttggtcgctgactcaactgcttcattaggttctgatgattctcgaaattttgtgctgattttgggttcgtgtgggagaggattccaacgagcagtgttgatatcattggacttgagtccagtttcatcttgttatttttactttgcgcagcacattggtgtctggcgttggatggagccatatacatactggattttttaacacgtatccaattcttcatttcccgtaccttagatatatgcttgtaggagtttgaggttgagtaccatggcaaaggtttgaattgtgtaattgcatgttttcacttggctttaggtatatccatcccaaatcttagatacgatgagacgattgtcacaatagcatgcatgaagcaattgtcaaatctgtagttactatcttatacttgttcgagtgatagacaatgaaaatataagtaaagttggtagtagtagatagtagtacaattcccaaacaaacgacagtagatgtggaagaataagtcacacaaaaacaacagtatgagcaagaaaagaagcaggaacatattcacatagcccgagtagaacggaactcacagcaccggacaagcagacgaaagcaatttgtgctggtcaatagacaacagaccgaaaagaaaaatgataatacagttggtgttccggcaaagaaatcaagccaagtcaggccaataggaataaggtcggtcacaggtggtacagagatcatataatacattaagaaagacaataataattgcagtaagcaatattcaatattcaacgccgactcgagcgcaggccgatacgaccctcaccaacgagggactgccatctgggcccaacgtggctgcggcccatttggcgcgcgcactcgtcccagtcttgttgggagaggcggaatttcccgaggaccagctcgagaagatgttggtcttcttcggcggtccagtcttgtggagccgaaggagcacactcgtctgttacctcgatggagggcagaggcgcgtctgggtcgacgcatggaccagctgggatgtcatagtccatctggcgacgaggaggagagggaggagattgggtgacaggaggagaatgtagggagtaaaagtctgtggaggaaaggccaagaggcatatcggaggggacgtgacggcggcgtttgggagtcgcgaagcggttgcgccggcgagtcatctccgcgtcgctgtcatcgccatcgagnnnnnnnnnnnnnnnnnnnnnnnnnnnnnnnnnnnnnnnnnnnnnnnnnnnnnnnnnnnnnnnnnnnnnnnnnnnnnnnnnnnnnnnnnnnnnnnnnnnnnnnnggggggcggggttgtgggcgggcgcggcgggcgggtgcggatggaggaggagggggtgtgagagcggcagttctgggtggtggtgtttgtctaggggagaccgggcgtgcggccttgtgcgatcgcggcgagcgacggggtgtgttgagggggagggggctctggaggcgttgagatttcacagatcgcgatgaaggtgtgggcgatcggttgagtagagattgtagtgcgcggcaggtgccaagaagaccgttgcccgatgcaaatcctgtgccggatgggggaggagttgagaataggcggctgggagtgaagcgagacgactggcgcacatcgcatgggagggcggatgggagaagcatgattgtagatataaattgaatgcgcggtttgagtggtttgaagttggtttgaagatgaatgggatcaaagagagtcaacgtcgagttgttgcgcggtcgcgcgatttgtgggtaggctgtgattgcgccggaggcggttgcgctgcgcgacgaggcagttggggatgcgaaaatgaatggacgatattgttgttggaatgcgcttcaagttccaccttttccgggagatgcgacagcaatttggtgatatggatgttttgacagtgagtgtgtagggagaagaagttggagggggaatgcggcgataaaaagaaaattggggccgcaaacggtcaagcgaatgatctcccgtgcaacgtcaagtttatttccggccacaaagaatgtgttcgatctattattgacttcaacaagctcaaaggaactatgaaacagttgaaacagttggcagagttgattggaaaaagaagggaatgtgagagacagatctcagggtcaacgaaagtgatgaaggagctgaaggagctaatgggaggagctgatggtaagaatactaggaacaggaatgaaggcctctctattatactatctacttgaaggacctgaaggacttgacattgtagaccagtgaaacagtatactaaggagtctaggacaagagggattacatgcaaggcgcatacaaagaggactacaggcacgaggcacccctgagacactttttccaattacacttcctatttaggcaacagatcgactctgtgcacgattttctttgaatttgtatagtatgatcagattgtattggtgtattgcaatgaagtcagagcctgtaacatcaatggcttagggctgtataccaagtatccaagtacagccctggttagacgcgatcataccatttctttgatttcctgatctcatcattgccaccgggggaagtcgcgttttaataatgatctgaaagaggaggttcccttcctactattctcctacttctcctacccttcaccaggagatttgttccctgccatgccagccctctaggactctaggactatagggcctctgaacactgccacttgtgtgatcctactcatagaccttgtaaatagcttagtggcatagtggagtggaatggtggcttcataattttcagcgcgttgacgcgtctcgcgtttctcgtgacgcgacgcgacgcgccaagactcatacgtgccctaacggcgtccatactgtatagaggttatagtgaatattactacggagtacagcatgtatgtgaatacacggaccactacggagtactcgtgggtcaatgcttagaatgccatgtgccctataggatcaaccagggtcatcccactcgggggattttctatactgtactgtaagaaattccattgcccttgcttctccttaccgggtttactctggtcaactcgtgcaaagatacagcttgcattatcttgcagagctctgcatctaccacattgtggggtgcagactggctgcacactgcgggccgacaagcattctacagatagacttattgcgatacaagcagttggtaaaggatattccagttgtgcctatcgaaaagggcgttgtgtctactccttgtaacccagcttgactagaagggctgacagcgccactagacctgtgatcattcaaagggactcagtacaataccgagtggagagccttcgaaatgttccgcagcctccattccaagacccgtgccccagccactgatcaaaatccaatctcatgcaaggggtagcccgaggatgaaactgcttccaccgagaatcattcatgagcacaaggctaggcttcggtaacatagggtataggagatacagagtccagcgcaacgttagaataaacacaaagcctataatagacgagcgtttctaatttccaacgctttcgtctcctaactatccatggatcgatgctatctaagcttctcctgcagtggatcctgcggcgctaatgcaagacatacgccccttcccacgggcctcgatgtcgatcgtctccacattccttcaatcggcaagccctaatgtggctgggactgtacttgccatagggcaagatactgaggtctcacacgttcacctttacggcctcatcgcctcagacatcgctcaatatggtagtgctcttgccccatcatcccctccctgtcttactttgtgggccaaagatgtgtggtttggctggcgatcaccccctaagatccgggtcttctaccgtacatcattgattatcttttctttttgttgagaatactattacagctgacaggaagttgtgattgggtctagggactgtgttctacggcctcgtctcagagaggctgtagtaccctaccgaggctcataacacttgagtcaacctcccaatcgcctgaccaccaattggcctgaaagtgagaccatctctccgggcttgctaccgatcagcactccctatttctgtatcgaggtctacccctcttctctacccccctgccctactgctagtgctctcatagtcacacgataagggccagggataagaataaagaggctacccaagtagaagtgggctcattacaccagaccctggcttcatagcgcccaatggacggtggaagccctcctccctatccttatccgtgtggtcccaggaagagctattgttagctcccctcgctccctcctgtcctctgtgggtttgtatgcccgaaggatcgcgaactattgcaatttgcctgtgtaacttgcttcctagggatggtcattgggtgacgatgaagtaacttatcgctttgcgtggattctccccgatgatactggttccaggttctcaaactcttaataatcttccgtacttgcttccaagtagagaacttctaggctcattgctaggaatattggcggtgggaaagaaatgctaacgataattattttcttcgccccatggcgaacatagagccaatatctacttgggaatggaatgttcatggcaatagtcacaccgtcaaaacttcaatgctcaaagggtatccaatatagcctcattgaccttgcattctcttaaaacgctcctccgcagccctcgctctgcgctctctctccaatcgcatcctcatctcaggcgtcatacctctagtctcttcatctctcctttcggctgcagacttctcaacggcgcccacagtacgaccgccagacttagtcgttctcggcttcgccgccttctcggcctcttcgcgttgtaggcgatccaagctagccttgcgccgggtagattcttcctcctcggctattttacgttctttctcggcccggctctcagcgtcggctttagagaccgccgatggaaccttggctacttcccagtcccattttgactcgccgagatcgtgacgggcaatgcggaaggcgtcgcgcgtggctcgatcgccggtgagttcgaatggagttctgccttcgttgttaactgccgttggatcagacccggcttttgtgaggagagccgtaactacggctggtgcgtcgaggtttgcggcgaggtgaaggagtgtagggcaacggaagttttgtggcgagtcggcgggcgtaaaggtgaaagaagaaggtatagagttgtttgagatataggacatgagggcgggaacctttgagcggcgaatgagcgcctgcagttgggatgtgtgcaacaaggcagcttcctcttctttcgagagcttcggcttctgtggttgcggtttttggacgtgtgtagatgattttgactcctgctctcgccgcttggcttcagccgcagccagtgcggcttcgtccacctcgctgaccttcattctggtcaactccttgaaggaccgcataagttccccttgagtcgcacggcgagtattgaacgggaaccctcgtaatcgggggtcgttctgcctgaggacctgtccgtcatattgaccgaaaagagtcttgcgatttgtctttccggtagctcggacgaacaacagctcggctgtgtcaatcatatctttccactccgacaacacatctctgatatccttctcaagtgcagcctcgttgtaccggcgcagacttgaacctgccgaatgggcagcacgacccgacgcgtcactggcagactgtgagccaccctgctttcgccgtgtcgtgtatcggtggaacgttttgtgcgcaataacccgagcctgcctgtcttcaactcctccttgctttcggtgaatctccggtgccagcgaaaccaacatagccgcgaagtggccaccgccgatcatgcacatgaaaatatgcgggcccgaagcagcggggtcttggacgttacttgccttattggtgcgcgctttgactggcgcaagctgcttccgtcggagtgtatcaaccaggtgagcgggctcgtcctgctcggcatttgagaaaatggccctgtagacgcctagggacttgtttgatggtaatcccgagctagacagccagaatatggggtgctttggagcgattggtgtctcagtcgcttccggatcctcgttcgggtgagacagcttggcctgcttcttcagcaaggcggacagcgttgtgcccgcggccccctctgcatcatcctcctctgtctccgaagactcagaaccagatatagactcatctaactctccaatcgccttcgcgaattcgatctcttccagaggcgcattcccgcgcagctgggctttgatgttataccggtgatggtccgagcggacatggctgcgctgttcctgtacactgttgtaagagaccctgcagagggagcataggttggaggttgcgatcgcagagtcctgtgcagctagttcgaggtctatcggagagggttcgggttcttgttcggcgacaggttgactggtcttggccgttaagcttgcaagaagttctggcggcagatcgtagactggaaagatcagcgaaatgaatcaacgaccatatagggcttcggaggcgtaccataaagaggccttttcaggagctcctccatttgagtcgtatcgaccatgatgggctggacgaagaatgtgtattgagatcgtggtgcccctccaatgacgctgttaagtgggctcttaccgcctaggagcaatgcagtactatgtggactctatgcgcttcgctcgcttttatgaaaagatgctggatctgcaataattttgagtcatgttgtggagctttgctcagcctcatttaggtccctgagagcgttcattttccatattaattccaggcttgtgggctgtgctcgcagatattaacgagtcggcctcccgattaggaaatcaaacccatggacatagtcatatcctcggtattatgtttgatacctttgtagggcatgattatgccgatgattctgattcttttccctaaccctatctcaatctatgttatgcaatcttttcttttctagtacctgtcgtcatcacgtgattttcgaatgccgtttcagaatcacctcgatcaatggcctattagccttattagtacacaaattcagtccatcaccgtttttttgcctgttctgtaggatgtccgacttacatgctttgcaggtcgatttgttccttttggtaaattctctctgcttgttatggtacatgcatattttaacaacattcaagggaaaatggcaagatgactcgtcgctatcgactgatagccaacgaaaacccttggcccctgttttatccagactaccacatacagctaatcataaaccgcatccacatcgttgataaaacagcgcttgcttccgagggccccgacacagggaaggttcttgtggtgtttgttgacaagggcggacgggcaatccactattctcgcctagagctaaaggatgcagcggatattgcatatctcttgaatttcatgcttcaagaacatgggtgttgggtcaatgcgcagattggccaatcctatgaatggggggcgcccttgagaccccctatggcgagaatggtgtgaggtgaagatacccaagcttcacttcacttcagtaagtctcggaaactagtcacactccttgaataccagagttaccagggccgggtaataagaaaggtgagtctccggtgatagtagtctaaacggagacctcaagatgcaacgtggaaagcggattgaaattggaggtgtggcgaagtcataatctaggcactggaaacccatggataacatcagcaatacctaagggtagctcctacacgggttggcatgaccaacgtctcttggccaatggcatatcgggaagtgtccctaggagctgtgatatgaggaagccaaaagtcttgataagtaatcaactgatcctctacccacagacgccaacgaccaatttgcaggcccgcagaactcgagtcgtggattgaagtgagtcttgtgtaagaagggtctatctccaagatagttcttcctgcaataccttgctcctggcttgatgcctgtcgactcgtacgtgtatagcccaagattattccattcccaccggaaccaggaacaatatttgctatcttttgtgcgagctcttgggcacgtttttgatatctgaatttggtggaaatgccaaagtactgtcggtcccaatctgtagtgaagggtgtgaggacgaagactttgggcgcgtagattgcattcaagacgccggggttatggtcggtcccaatcagagcagttatagattgtgcatataatgtcccatctcggagggacttggatgcattcatcgtgaacgagtcgtcgtcggttggattgaaagctaggtcaacgaacacagggctttcccaaatgtgcgaaaggtacacacccttttcggatgctataatcaccactgtacatccgtaaatgccctttactcctacagccgagtgaccaattgatggatagttaaaccattgtgcagacactggtccaggctggtcaatccaaattggcgccaagctcttgacatagctgctgtaaggaggagaagcgtcctgggaagcatatgcaatcaacgaactgatcatcattttctcatcttggctgctagagagagttgtcttggagacaggccgtgtcggacttgcagctccactagttgtagcaatctcacaaccctcggctggtagaatagtggtaatatccgttgggatcgactcataatgctcaatcatggccgccactcccatgctagcactacccagaaggcttgttctcatagagctcaacttttcgcaagtatcgggagggcataatactggagtatcacttgtcgaggtactggaaaatgtggttgctgacccagcgacagagtattcaatagtggtagcggtagttgaaggtaagcaggttgttgttgaaacagtggaattggtgtcagaagctaatggtttgagcatcatccgtatcgatgccatctgaaacgaactccaacggcacgtccaggcgggacgatattgctgcatctgagtttttgatagaggatgtttctcacccaccgtagtggtgtatagcattcctcgactgcagcaatatcgtaaagctaagacagagaaatctgtggacttgctacccaggctaggtgggtagtggtattgtggcggaagcaatattcccagtgttggtacttgctgatgagatctcactcgataatgaagcaatggttttgctattacttttcgagcaatgtgaatttttgcattgaatatcttcggttctgacagaaggagtggcagagtagagaaaggtgtgcatctcatgtcactgatacccaaggtggtaattatctggggactacgctattatattgaaagagctatatgcagagttcctattgaagacaatgacaataaagtttgtttgcttgggcttacatacaataggattgtgatcattgtcataaagcacccacttcctatcacttagaggctaataggctttacactttgggttataaacagttcatctaatttaagggtgtattatttgaatcaagaaagaagggtttctgtctaattcgtaggcctgtcttcctggtaagatcttggtcctaaggataacctcgaatacggagtagaataatgctgacaagtatattcatcaactgactgcgaatttagtgtaatagggtcaattgatttagactgaagcttgaattgagcagcgcctattagtgtgttaattctcaagacacgtacatcgcctagttagccgcttgatgtttgtctcgagtctcgacgcatattcaaacccgttcatcacatgactaacatcacaaggcccatgcgtctctttggcaaacagccgccctcgtcaagctctcatcttagacaaaacccaatatacagaaacgagaatttaccatctctgtgggaaacatgtcttcaaaacaacagcgtcaacagcagctaatgctaaatgcacgccaatgtcagatgcagatgatggctgctaagcaacaaccaagcaccggctgcaacagtggcaatcctctacagcagcaaatgcagcctcgatcagggacaatggggtccaaatatgatgacctacccatactggagcccactgatgttatctttatttctgaagatcctaagtcgactggtctagttcccgccttcttcggatcttttgaatccgcctgccagcacggcaccctctccaccattcagtccattgtctcatccaagaacctcacacctgcttttctccatcatggtcttacacgtgctctacgctccggaaatattgagattgctcgctatctcctagatagtggcgcaccaatagttcgcgaaactccaagcaatatcttctttgtacctttggaacagcaaattgccctctttgagctctttacccagtataattggactcccaatacaccaggctactatggtagtgtcctgctccctcgaattatcaagaacacccctcttcttcgttggttcctcgaccacggagccaatcccaaccttggggtgcagcagaccacccatgacaggtgtggtgggccagatacttcctcgtgtgctgcacttgaggcagctgcagctactggaggagttgaggctgtgcgtatgattttagatgcgggtgctaacatccaaaacggtgtaccactacactacgccgccggggcttgtcctcccggtacgaatccacatgctgggaaagtggtaccaagccgtgaatttgatactagcagaattccagtgatggcactactagtcggtcgcggggctgatgtaaatcagagagaagagtcacgacacatggtcgcgcagtatgcgattgtatatgcggcgatggcaggagcagttgagcgggtcaagtggttgttggagcatggagcagatccatatataaaagggaactggggcagtgcagctgagtatgcacttacctcggggaatgaagagataacaaaggtcattggggaatttaccctaaaaaaagcttgaattctgcagttttgatatagcatcaatgaggaaatatattgtgctatcatgtttcgaaaaattggttatttgtcgaagaaaggatacgaaaccattaatataaaatatacaataaacacatcaattttgatgatttgaattagcgaccagctttatatgctgtaaacagtcctttgaagccatcacaccttcctaagttggaagacaaccccgataagccgaaatagccgcatcggtattagtgcgcttatccccgaggattacatcattccaggtcacgtgtgaggtctgcaaaatttgtatccaggaatgaagcgtctaggaagatatacggagtagtcaattttatgttacgcaagtttcatacaaggactccagagaaccctgcatgtgtacattacggtgtaatccatgagttcgactccataggctctaatgcgcacggtaaccagccccgattttccccattctgaagtggagcgctgcccgttcttgcttttgtaagcagcctagcttggaccaacacccccgttttcttctagttctccaacttcgtatcttttcttgcttgtgcatagaaaggcataccgagccactaagaaaaaaaatgctggatggccaatcccaggcggtcctagaggcgtcccgcccggggcatctcttgcattcccttggatcggcacttgattcgcggcgacagcctttctgcacagatagcgagggctggggcccgctcagctcatcgagattcgacctgacaccatgctttcttgacgtgattgtggcgatagtggcagtttggggtacactgagtggactagcagcgttgtggttattattgtggaagcgggttccgcagcccgtatcgaagaattggcacttctacaccaagttggttagtacatatcggacacgcgcgcacacttgtggacgttaatttactgactggtgtttttgtcatcctaggctgttcttgccgctctcatcattgttaccgcccttcaagctgcgattcaagtcgaatcagaacccaaaatcttctgggccgattttcgcttctggtcctccatcctgaccatcatctcgctgggggtgataacttcagtgcaatattttgaacattggcggagtagacagcccaatggggtcgtcctattttactggcttttcttcatcatcgcctacgcggtcaaactccggtccctgattgcgcgcaaagaatacatcgaccaactcccttactttgtctgcttcaatgttagcttgggactggcactctttgaatttgtgcttgaatatttcgtacccaagaagcaaagcgcatacgatgcgctgggagatgaggatgagtgcccctacaattatgccgatgttttctcggttcttacctttggttggatgacaccgatgatgaaatatggatataagaactacttgactcaagatgacctctggaatctccgcagtcgcgataccaccagagccacgggcaatgccctgcaggaggcatgggatgaacagctcaagaaaaaggagccgtctttgtggacagcactcttcaaggctttcggcgcaccctatgtgcgtggtgcgataatcaaatccggaagcgatgttcttgcctttgtgcaaccacaactcctacgacttctcattgccttcattgagtcgtatcgaagcccggacccgcagcctgttatcaggggtgtcgccatcgccttggccatgtttgttgtttctgtctgccagacgagtttcctccatcaatatttccagcgcgctttcgacactggcatgagagtcaaatcagcgttgactgctatgatttatgccaagtctctgaaattatcaaatgaagggcgctcggaaaagaccaccggtgatattgtcaaccacatggcagttgatcagcagcgccttgcagatttgacccagttcggtactcagcttatctctgcgcctttccaaattactctgtgcatggtctccctttaccaacttcttggcccgagcatgtttgccggtattggagtcatgattctcatgattcccctgaatggtgtcattgctcgaatgatgaagaagttacagatcatccaaatgaagaacaaggactcgaggacccgattgatgactgagattctgaataatatcaagagtatcaagctctacgcctggaacacagctttcatgaacaaactcagccacatcagaaacgatctcgagctgaatacgctccgcaaaattggagccactcagtccgttgccaacttcacctggcagtccacccctttcctcgtgtcttgctctacattcactgtctttgtgttgacgaatgataagccattgaccactgagattgtgttccctgcgttgacgttgttcaatttgctcacattcccgctttctatcttgcctatggtcattacgtccattatcgaatcctccgtggctgtgaagcgattgatagattatttcaccgcggaggagctgcagaccgatgcagttattttccaagatcccgtggcgcattccggtgacgaatctgtccgtgttcgcgatgcctcatttacctggaatcgtcatagtgggcagagtgtgctggaaaacatcgattttagcgcacgcaagggcgagctcagctgtattgttggccgcgttggcgctggaaaatcatctttcctccagtcattgctgggtgatctgtggaagaaccagggagaggtgatcgtacgtggtcggatcgcgtacgtcgcccaagcgccgtgggttatgaatgccagtgtccgagaaaatattgtctttggacaccgatgggatccctcattttatgaccttaccgttgaagcctgtgctttgctcgatgacttcaagaacttacctgatggtgaccagactgaagtcggagaacgtggtatttctctttcagggggacaaaaggcacggttgactctcgccagagctgtatatgcccgtgctgatatctatctcctggacgacatcttgtcagccgttgatcagcatgttggacgtcacatcattaacagagtgctcggcaaaactggtctcctcggtggcaaaaccagaatccttgcaacaaacgcaatcactgtattgaaggaggctgacttcattggcctgctgcgggataagaccatcatcgaaaaaggaacttatgaacaactaatggccatgaagggggaaatttccaatctcgttcgctctacgatggttgactcggacgatgaaggtactgccagtgggtctgaagatcttgctagccccgaaagctcagtcacaacggccatcatccaaaacggcaatgcatcggatagcgaggaggcggaacaacttggtgaccttattccaattagggcaggaggtgaggcccgtagacggactagtaccgtcacgttgcgccgtgcaagcactgtgagctggcaaggcccccgccgcaagttgggagacgaggagaacgttctcaaaagcaagcagacgcaagaagtttcagagcaaggaaaggtgaaatggggtgtttacgctcaatacgccaaggatagcaatatcatggcagtcgtggtttatttgattgccatgatggctgctcagactgctcaagtggtgggcaacttctggttgaagcgctggactgagtggaacgaagcccatggaaccaatgctcaagttggcaagttcatcggtgtctacttggcgcttggcctgggatcatctctcttggtcattgtgcagaacttgatcctgtggattttctgctctatcgaagcatctcggaaactccatgaacggatggcatttgctatcttccgctcccccatgagcttctttgaaacaacaccatctggccgcatcctcaatcgtttctctagtgacatttacagagtcgatgaggtacttgctcgtactttcaacatgctattcgcgaactctgcccgtgcggtgtttaccatgattgtcatctcggcagctaccccggctttcttgctgttcgtcattcctttgggttatatataccttagctaccagaagtactatctgagtacctcccgcgagttgaaacgtcttgacagcgttacccgaagcccgatcttcgctcatttccaggaatctctgggcggcatctcgaccattcgtgcctaccgacagcaggatcgattcgcccttgagaacgaatggcgcatggatgctaacctccgggcttacttcccatccatcagtgccaatcgatggctcgccgttcgacttgagttcattggttcaatcatcattctcgcatccgcgggacttgcgattatgtccgttgcaactggcagtaaaatttcgccgggcatagtcggtttggccatgtcatatgctctccaaatcacacagtccctgaactggattgtccgccagaccgtcgaagttgagactaatatcgtgtccgttgagcgagttctcgagtatgccaatcttccgagtgaggcacccgatgtgatcttcaagcgccgccctgccatcggctggccggctcaaggtgcggtggagttcaagcactacagcacccgctatcgacccgggcttgacctcgtgcttaaggatatatgtctcaacatcaagcccaaggagaagatcggtgttgttggccgaacaggtgccggaaagagttcgctcacgctggctctcttccggattattgagggtgttgaaggaagtatcaggtaaggacatatgccatcatttgcctttgcgcttttcaagctaacaaaaatttagtattgatggacttgatgtgtctacaattgggttgaccgatcttcgtgggcgtctcgccatcatccctcaagacccggccatgttcgaaggcactttgcgtgacaacttggaccctcgcaatgcccacgatgacaccgaactttggagtgttataggtcggtttaacatattctattcaatttaccgccagcaactaactggtttgcaataaatagatcacgcgagactaaaggaccatgtctcgaaaatggacggacaactggatgctcagattcaggaaggaggtaagtgactgcctgcatctagacattgcctagggcatcccgttccctaacacatttctcaggctccaacttgagtcaaggccagcgccagctagtatctctcgcccgtgctcttctgactcctagtaatattcttgttctggacgaggcaaccgtaagctaatcctgcctttgcttttgaatgacagattcagctaaccatagcgataggctgcagttgatgtggagacggatgcgctgctgcagcgcaccctgcgcagtagcatcttctctgaccggactatcatcacgatcgcgcaccgcatcaacacgatcattgactcagatcggatcatcgttctcgataaggggcgtgtggctgaatttgacacgcctgcagagctaatcaagaagggcggcaaattcttcgagctagccaaggaggccggcctgctcgacagcgatggtggcattgcctactcgcaatagcgtatactgcaatcgcctgcagtggcctcgaatccccgcgtttcctgttctggcgaaaacatctctcagctagccagcccatctgagaacattgaaccagccccatccatgcagctctgattggggaggctggatttattttttggcacctcgggccgatcttgggaggtcccggatgctctctcgctttcttcttgcaggggtcacgttgccaacagatcgttgctgaccgttcaaagagtaggtggtcctgaatgtggcgcaggtgaccgtgcatatatgcatgtacatggtactgaagaaaaaattttcattgcacagttcaagggacccccctgaaagggatggacagacatgaaaaacgttggagagtggctcaatggtgcaatctgccgcgaattttttttttctatgctgtcctcgagtctattgttgtttcatgttgggatggtgtttgcctcgctggtgggtgggtgggtgatcgaggacatccgattggatttgaccctgcgaactaaacgataaaaagtgattccctttactccgtacattagctttcttgtttgccttgacatcttttgatcaaattgtggccgtgcacagcgtgttgatatctactgaaatagcctgaattcctacagcgggcattgcctagacccaagcagcaactgaaacgtaactatgcattaaacttaattaacacacagctttccttgactagggcatcgtctgcgatggttatctgcagtagcgtctcgtactaaacgtggcggtgtcatcttgatatcccatcagaagagcgagttattgtagcggtgaacggtcagccacctggctgtctatcaagggtgtctgttcgcaggcccttggggtcagcaatataacagaatgtcagctctacttatctattagtgatactatttagcgaagaggacatgaagtcaagattgtcgaatatcgacgcacccagaccctcctccgccacatgagccccccttctctctggttcgacggtcacatcctgagaatatatctccggggcaaaaatagacatgccttttttttttagatagctacgtatacgaggtgtacctccttgctgcctgcaaaacagactctccacgcggtcgttggaattgtagtactccgtgtatatgcatgtaaactgtacagataatgaggtgggttatttgcctcggtggaattccttgaaacatccgagatagctttcaaaatatatctgccgacagaaaagagaactaagtttgcccttgagaggggcaaagggaggggcaatgacagcagtctccattttgatttgcatgtcaaatgtttaatgggctttcaagtgctccgtatgttgtaatgattgacaatttcgaaacacaagggatatcacagtatatctcgcgtggagaatgaacgatcgcatggcattatcgactacctcctaccgaatctaattggatgcggacctgcgttcgtgatatgtttcagctattcagatcccaggcaagggatgtgtaagatgacctcaaaaaacccgctgcatgactgatctctctgtgagttccgggggacggcggcactgcttccttaatcttgtttaatgggccatgtcatgatgagccaaccagagcgagacaaatcgagatctccagatcgcgaactactacccaggttgtgcacgtcgacgaaagaagtaatggtccttgtaaaagtagatcgatctcgcacggacaacgcaaagatcaggttttccggatagctccagccggggaagagttgtgctttcctagcggatatggatagaatttgttttgctgctatttttgctgaatttttgtgctctacgccgtatgcactgttatggactcatggcatgcattcgtccgcttcttcctcttttggcccccagcccgaagcctccactcgaaaatggcaacagccattccccgaacgagacccgatgtcaggatccccgcttctcagcaggtcgatcgtacatagctatgtacacgtacggtgctgtgcatcagtggcgagtgggaagctgattgtgcgacaccagcctgcgagagctgagcccgtttctgtatggaggactggctgtcttgagcactatccactatgcacactaccggcgcaccagcggctccagctttacacatatgatggcaggaacctgaaagttggaagtctctttccggaaggtaacgaaccaaggcgttatcggtctgcggagatactccatcttcccctctccaggccagatctgacgtgacatatcgaaaggatattaattttcgtggttaattcatacttatttcaaaaaaggcccaacggcttgaactgcatattattggttgtacaataatatatcaaacgtctggtattgagacagaatcggggaactggaacgcctgcaagcctccgatcgactcagccctgaggggaagagcgggaacccacagacacaacacaccgcgaaaatctcatgcacgatgcacaatgcaccgatttcagtcctagactaccaatgtggcgggattaggggttcagttctcccggaggcaaagacccgcctcgggccacaacaggaagtggaattagggccatgatcaccgagggaaataccagagacagattcgaaggtttggattagaaaaagtcttttcgggggttcgtcttaattagctctatacaacacagatggggaacggaacataatgtggatagttccttgcgtcgaacagttcgaaaatgagctaatctaatggagccggtgggaatcaaagtggcaccttcatgctcgtaatggcctttcctgttggagagctacataatcagacagaacgcaggaaggcctgcattcagtagtccgtactccgtagtaataatggcatgcacctgaattatggggcgaatggagggtttcaaggtatttgtcattcccaggccccacaagaacgctttctcttccccagccacaaactcgcgtggaagccgggccttcccgggggggaaagccctatgggtgggattgaacgggcgaaagggatcttgctagttgatccatcgtgcctttcagtttcttcaccgcatcagatctccgccgaatatagtagatgatcaaagtctatacactggcatccgtttccagcctcaccactcgatcggaacacagatctccagggacgatcgcgcggatgctgcttcgggcaatttgtccgtctttgcaggcgacggggaccgaaatggtccacttgtgaagtgtttggggtggtggtattggcccgcggatcggagataagcggacactagagactagactggcaggctagcgtgattgctgggaatgagatatatcttgtcgattgggaaagatttggattggtaaacgcgatcgcgagtgttaggtttctgtggtggattcgtcttggagatttggggtcgagagtggcccggggaagattttacagttccttagctgagtttacactatcaacgcaaatgaactgcggagtagccagtgccagtgcacgggaagaattgtgcaatgattggctgtgggtgaaagttgagcgaaagtatgatgcaaggacctcttaaggcttaaaaagattccgatggattggacatataagccacgtctccattcactcatccaggtacttgggactctccaagatctccagccttcgaaggttggagtggttgactgagtcattgggtgtaccccacttggcgctgttgagttttgtggctttgtggtaacttcctgctgaaccacggaactggatgagtttatcagagttcaatccagagcttcatccagagttccaatctagatatggttcgaactatggaagcgtcgacatttgatagaatagttcgggcttttctccccttacatatgtcccatactctattctatgcgggtgatttccacgttcccccactgaggcgatgaggcggccggagtaattttccgcagcaagggtgcctcctgactatcccagggctaagcgagacccggaagtggaccgcgaacgacccattggagaaaattcggccaatctactcagactaactagatataaagtacgaatcacgccgccacctgccaaggtggatgtcgagattgctcgtacatagatagactagaccgaaatgatacagtctcaggggttaaggtaagtcttgcatgtatacggagtaccgaggtccatagtcggaaatttactctattcgcaacacaatgagtgaccaacaataaattgactgcagtagcgttgccccgactcgtaggaacaccatgggcggcccttcgggccgtgccacaatggagagatgattcgctgctgtttcacattgcttttgtttcttcccattgtctatccacatctctattgcaaacagtagagacagaaatattgcatatccatttggaatgcattaagttatcgaaagccatgcatagaatgcatattcgtaatgcttttcgacttacaataagataggcgacaaccttccaagctcggaatgaatgctcattgggattggctgccctgaataggaatgatgctatgatcaacaccactatcactagggcacatgagaactggacctcgtttacgaatccagatgtaagcatgactcggaagacctcattcgcatctggacaagccatcgcttcctgaaaccttagcctggcgttatcaaaagtggtaattgaatcaaccgaagcgaggctcgtttctgcaccaattccagcccactggatagagtctgaagggctctatgatcctcaactttgacctttcccttgggatagtggagcaccagctagaccgtatccgaggtttgacagctttagtttgaccggaccgccatccccggcccgccccagtctagtggcttggtggggaccagccggggcgagtctgggcctcagggtcttagcgagattggacatgggaccaaaggggatactccacagtttaggaaagagacatcgtcggacgatgattggccgctgtcaaaagtacaagcgcgaatggcacttccctgctaatcctaaaatggatacgacatcgttgtctggggagtcctttcctacgggtcccggcttcggccacaaaaacgccccgataaagaggggggacgctagatgacgcaatgccagtgcttctcagttcgatcgtgctcgatcgatgcgcataattgatcgatcgtgcgtgcggaggcccggattcgtgcaatagacctgcactagtcatgtgcgattttgctccgtcccgaagatcaaaatagggtgccggtttgataggccctgacgtgcctctaatacgaggatattttagcgaatgcagctatctcttgcccgactaggaaacaccctcctttcacgcgtgcaggttgcctctcaacggtatctttgacatagcacatagcacaccgatcatgcagcctccaaacgatattattgatatcgagcagactcatactctgtatactcccccttttccccctccgatcgcttcggtctatactccgtacgattggatcatcgagatttgaagggaactatacatgaagcagtttttagttgctaaagcatgaaagaaggcgtttaggagttcctttgtatattctgtttgtatatctgtactacactcatggcggtgaaataacctaaagacacaccctagtccctgtaatcagcccgggagtttctctagcgttccagaaatgtgcgacggacacatacatgaagtcgtttggctagatcgacaatccccaaccccgaccaacccataccaaccccgatcgtgtgatttgttgcagttctccccaatattctgacttggaccccactcagttatttccttcccgtcaatgcacacccgctgtcacaatccgccgagtccgggccaaagtctacgcctcattttgaggtttcagggtaattgcatcaccgaacaactccgctctaactctttttttgtacttcgtagtgtcagcggtaatagcggtcatcttaaaagttggcattgataaaatgtcgttctgaaactagtgtgataaggaattagaaatgccaagctgtcaaacttggtgacgttttgtctggggacaaaactcttacctcgattaaggtccagggaacatccatgaaggcttctttcctgtttagtcactgccaaacagtgcaaacattttgcctcccagtttccaccgtggacctgccatgtccctgtggcagtgcccaaaataggcgagccacgttgtgtggctggtctgagcttcggctaaggtaaattgtagggatcaccagttacgcgacccaatgagaagctttcgtttagaagtgtcaaatctttgatgatcactgacataattgtttaaagaaaaggggggtgcatctggaatctagacctccaagacattgaaattgaatattgcaattcggagtttcgaggtagtccgtagtccgtacatacggagaacccgtgatttgaaatgcgactagggctttattatttatttatttttttactatcctttagagggtgttgtagtgattcgcacgctcaaaagaccacggctaaacgccttgctaggaacagggaatgggcggcacaaacaaagagatatactatccggggatgttatcgctgaagccgcaggtttttcagatactggatcgagtatgggagtatgcctagttttacgtctttgcgccctcaaagaatgacaaataacgtatagagtaactactccgtgatcaccgtttttctagaactgtttagttcaacgatattgctttgttctatgcctcgcggtaacttaaaaaagatgggtttccgaaggcactgcggctctattgctgtacgtactacggagtagacggcacggcaattgaatgccatgtatgtacggagtttcaatgagatcgatcagatcgatacaatcttcatacgcaatcagattggagttgtttgtgctagaaaaattctgcctcttgcatcttccccgataaaggaccgaggaagtatgtgttccccttttgccatgtcaaaacagatatagtgttttagattctcccttttttaagtagccctgatcgaggtgggtatccatcttctttgtctgtagtttcaagacctacagtgcaagttgtagcgttatcccaagaaacgccagtgtaatccaccgggacgggagatggacgcgttgacagaatcctgggttaccgagtttccccttcccctggactcttagcacggacccgggcggagagccaggaggtctgctgattggtctgtcacaaaatgggtcggacgtcaaaaataccgccactaacccgccatgggatagttcgtcgaactattttgcaaccagttttcttccccgggggaaagaaagagtagatcacgccgtggtgttgggatttcaaacactacattatctcgatctgttctaggtcggattttgaatttattatagcttatcctcgcggataaaacggcgtaggcgagctacggtccgtattaccaccgtactttttgatttcccctttccctccgattgaaatgacggatttggtcaagattgatttagatcgatttggcgagatttgaggtctgatctcagggggcttttaagctatggattttaggtgctatactcagctgaagccaaggtctctgattccagaaacccactgtgtttggcttgccaccccggagtacggagtaggtatctgtcaatgaacggagatcgacagcagcaacaagctccagacggcaatgaaaagggaacagtgacatattatcggcgagtcatctcccaggatccaggatgatgggccatgcacaagccggatcttgataggttcaccaagaatggggaaagtgtggattcgttcacatggttggctgctagtgtcggggcactttggtgctgagatccgacgatcgagaaacacaaaaagaaaatgttatagataaatcccagtcacaagcaatgagtaataagtaatataatgtaatatggcggaataatataggcatcattatacacttttggtcctctatcaacatcgatgacaaattacttatcgaaccggagcctccgaaaggtctgtaatctgcacattaagaatagcacccacacggcgtcaaatagggcctgtgcgtctccccaacgggggcatttgggtgtgcctgacagctagacgcgagtgcttagggctaattgtgtcgtgttcgctatgatggacatatctgcgttgctaaggtctaggccaacggttgcctcgtatgccaatcgtaactgactgcgcgatctgatcccctcggttttgagtcttccaactgacagcaagccatgagcctgggttgtggggggttggtcgatcgataatgagcgccactcttggggtttgtcccgactggaatttaatggaatttcctccgtaatggaattaatatgagtttaaataatataatataatattcaaatatatataaaaaaaatataattctttataaattaaatcaaattaatatgcgatctacaaatagtgggacagggatcctggatcgggtccccaagtctaagctactgcaagtcctttgaatgcgccaatctgcatacgatcagagacggattcggcctcctaggatcatccatgttgaattgctggtcgattttggatcgtccttttgtcatatagtctagaactgaaaaaggcttgcatatccccttcttatccttctggatttctatacaccctcagctttatttaaaagatcatcccacttgcgcatcttctttttaagatatttcattctcgactgctccaacccccggtctcacatctctcacatacttgggaacacaaaagtggaggctgcctttcgttcctgcatcccggttacaaacagtcgccgtgctgcagttatccgctttccatccccattgagacgcctgcacattgttacccttgaactgtgtgagtacatcccagcaagttgcttctggctctgtttgccagagcttgattggacgccggtggccagattgccagcgtttgtcctaccggttcccgcgccggagcgaagatggctcttccgccgttgggttgttcatgaacaccctctgccggggacggaatggtgctgccgaagatgcttcgaggcagttggctgactggatctccacagtgctagcctttcttcgcactaaatcgcaaccccgccacccgagcaacaatatctataaagagaacagttctctccggggcaaacccacatcattctccttctctagtatcccgatacactattttgactgagactcaattaccgttctcaagacgatttcgtccagcacctatttctgctactatggtttacaataaaccaacaagcggagccatgaagagatctgcttcggctctcgatggacccccaggatggggagatgttcctgtatgtgttccctcaagagaaacacaggttcattcttactgatatccgtttagtcaatgatgaccaactcccgttcatcattccgtcctccttatactcactttgccatgatctacctcgaccgtgatggcaagctcaatgttgaggaatcaccttctattcaagagcaaaactccactgtgtttaccgcagaggtccgccagaacttcctcgagattctgggtgaacgcatcggctaccatgcccctcgccgtatgtccaagttccagacccgaagaccaaccagtatatgctgataccaatctacagagataatggacgtatctcctcgtcgagtgagacgtcgcaagggcaatgctcctgctctttctgtttgtgacaaccgcctggctgatcaggacactgatagcgaggacatgcctaacgggtctactgaaatggttcccctccgaattggagactctcaaaaggtcatggcctactatgaaggtgccctcaagcacttccagcaactgaactgccgtatggttgccaaggcgttcatcaaatttatcgagcctcgcaagcaggtccgacacccttataatggtggcaaggccccgccaggatctgcccccggtactaccggtgacccagaaaagaccaagcccgagtggtggcctcccggtgttatgcacaaggagcctgatcacctgagaaaagagtgtatgatttgcccatggtcttgattcttgatctactgactaactgagctttaatagaccgcattgagctcttgcttcacattatccgcaagctcggttctttcggtatcactgccgataagcttaaggatgttgctggcgacaccaagcgaagcttgaagcacgcatctcatgtcgagatcatctacgagatcctccgggtccgcaagatggaggagcgtttcgaacgaggtgaagtcgacgccagcatggtcgtctacaccatgaaccgcggccccagccctaagagtgatgaagaagacgattccccctcagtgaccattgaggagcctgagcacctcaaccagggattcatgacccccatctcatcattcgagcacacatctacctccttagccacacccatcgacaacatgccatcggcccgctccctcccaggcagcttctccatggcggagcctctcaccttcgaaaaccccgcccgccaggaccgcccctactacgccacaccttcccaatacagcgattcatactcgcagcccatgatgagcacccccgtaacatcggagatgatcagcccccacgacgtctcagtctcggctttcgactactctcacaacacctaccagaactccacgcctgatcagtcacgcgggggaatgagcggacactacgatacctgggccccatctttccgccagaacatcttcagccctgtcgactacactacaccagcgactagccagggcatggcccagccttcaatgtcctaccagatgcccatagtatcgcaaatgcatgacatgtcccatcaccatgcccagcaggcccacatggactccatgcaccaaagatccctgcctttccgcacgggatcgctgggccacccacaccccaacgggatgactctctcccacactgtctaagtggaacgggcgactggaggatggcgattaaatgggacatgggtacaggtatggatatggatatgggtatgggtatgggtattaacgaacgtgaatgagtgatggcactggccaacaaacttggcgctcatcttaaggccttgccaggggagttgttgtctttctttggggtttattggataaaaaaacttggtgtcctcttgacaggtgcaggtacaaatgggttctgtttgcttcttcgttttggaaatatttgggtcttgtgatttgaagtgattgatattccggtctttgtttttatctttcttcttttggtctcgcctttttttctcacctttttttttctttcttggtgttagcctcatgctttttttcccttggtcttctgttgagctttttatctgctttgtttggtttttatgggttttcttcaacgtggatggttggagctgttgatacacagatttgggtagatacttcaaaattttattcgttggtaatatgcaactgagctcctctatttcttttcacgatcttttcattagataccagtattcaactatgttgtacctatatagttgatttcctctgccacttcttggcgtgctctttccgtattagtgctccttattattatgttagccaaatgactcctctctgagttcctcattctctgttcctgacagtctaaggcggacacgttgctgcttcacctgactgtctgttgggcgcgaacttgaggctagcagtgaaagaccactaactgagagcaaactactgatgtttgtgctgccatcttgcgataacactgaaccgcctgtctctcctagatcccgtatgagcttttcaatcgtttctgccctcccactggcatgcaatatgtttccaattgctgcatataactgcaaatgagccggtccagggagatcaacacgcgggcagtgatttgtcaatgataccagcctgtcctttggcaatgcaagttcgcagacagatgagaagcgcgggaaagtttcgatgtggtattgatgaggggtcgaagtggcctcaagaacaaagtggaagcggcggaactcaccatggaaggtatcgaccatcatcataatattatccgcacgattaacagcttcggatgtcatgtcaaatgtagaccggagactcggaaaatagcgaaagatttgtgtccatatctcagagattcggcgctgttcatcatcagtgtcaaagctcccaagagcaaaagggataatgtggacagcctgtaaggttccttttggttggccggggggaaaattgtggtcagagctccaatgcttggtgatggtgcattgatagccgtctctcttcaaacagtcccggcggaggcatacttgttcatttcgagtcgctgatgtgatgtcgcgagagtggaggtcttcgaccgaatcttcaaaagcgaggcggggggatggggtgatggcgggggtcttcccgccctgggatagcaacggccgcaacaggcctgtatcgatgctgttggcaagctgccggatttcgtcgttgtcgttgcagtgccgacgttgatgcggtcctagatatgagataccgtggcaggggaagaggtcgtcgcacgcaatacttagtacgatggtccgggcttggaaacgaacacctggaatggttagatgaggataacctcgtcggagcagaggagaaagtcctggagtacctccaagacgtcctgcgtcatgcgcaggattctatcaattaaccataacctagaaagggtctctttatattcatatttacttattgcactacccctctatcgaccgctagtaccctgttcgtttactctttcatcatctcatttccgtttctactactttgttagtatccactaccttacttatctctcagttccttaactatttcaatcctcctgtgcctctcagttttcttcctcctatatctcttagctcgctatttaatatactacttattatcctacccttaccttactaatatacctatccggagatctgtaggtcgtaggcgttgtccttaagccttatagggacgcgcttatacccattatagtatagctagcgacctaaatgagaatactatagcagctgactataccgatactaataatgaccctctgcctactactaagtacaattccggcttacttatagataatatcgcggataatagtgacctaggcttacttagggaggctcttatcctacctaagagcggatggactatagataatctaaggccgaagctacctcctatactaagaactaacgttatacggtataccttctataccgagcgaaccttcgcgctcgcgctctactatttctataataagtctaccctatacgcactgcgttaggataaggcgaagatattatacctaatcgatagctaacgtaacagtaagatacctagcccttcgtcaggcaggaaaatcgatatacccaccgttacaatatggttcgttttctacttttcaattcataactactgggacaaccttaagtataaagcctgtcttgccttatcttacgtttaactgacggataagggcgtcttctactacctatacacgataataccgtaccagagaagttcccggttttaggcagactttgaccaatatagggatattcgtacctcgcgtgttcctctggaccccccgatgatcgtgtgggccaatggattgccctggttcccagtctacaaagcgttttacgtcctctgtgggagctggagccctgtatcgtacctcgtgggaaggaagtaccgctccaaaaccactgagttttacatcggtacagcactggccccgcctaccgctgtcttggccggtcttgaagattctctgccgcaattaaccctccgagcatttgattcagcgacatacccagatcctaaggacacaaatggccccctcgacctcgttcatgtcgccaccatcagccgtagccaaaacaagaccccctgcccgtccactcgctggcctaatagggagacctctggaaaggcgacgtacgcctttttgggttctaaagcgaccccgtgcttttcgagcacgtccaggacaagggtcaagtgttcgacatgttcgtcgaaggtatcagatgctgtgacgagatcgtcgaggtacgcacggcagaactcgacgaactctttcaggagtaggtccatttgcctctgaacgtagggcacactgttgcagaaccccatgatcgcgacatgaaacttttcctggccccgatgcgagacgacacatatccgaccgcgatgttcgcgtcggacgcgccattgatagaaaaacttagatgcgtccaagacagtgatgaacttcttgccctgtgtcagaagcaaaatatcatccatggtcggaataggataaatatcgcgcacgacctctttgtttagcggccgaaggtccaccacggcgcgacccttacgctcgggctcgcgcccgggccggtgagtagtacgccatacaacaaagacggggaaacccgtagcagtatgtcccgttgtataactcatcttcccttggtcatgcaacggttgaaaggcagcgtcaataacctcgcgatccttaggaccaactgggtaaatcttagactttggaagccgtgcctcccagccaggtttgaggggaatcctgcccctcgagggggaagtaggtaaaacagatctcaaggaaccttttcgtgtcgtcggtatgatcgtcgggatctgacgactcgtaacttgaaagcgcgacatcgagggataatttggcctcggcaaaggtggagaatccagttgatgaaacagcagggctgagagtctcatctgactgcgacattgcaaacaagaggctggaaaggtaaaaggaaacgagtggtacagcggttcataacattcaacctgccgtaaccctttctgccgcctgcgtcacctagttagagttatcaaaagttacttcacaaaataaacagaattatagggccgagtgctctctttgaatagactaagcgtaaactgagtgcacaatagataccttcgacaaatctctaagtaaataagcatactcaccgagtcacgtgattattgcggagcgaagcgtagcaattaaatcataacctcgtgtgcatgtcacgtgaacgttcttttcttgtttcaatgcggtgaagaagtcatcggctaactttggcagaataatccaaccggcagaataaatatagactaggcctaatctggctagacgataatttctattacgtgctgtaggttacttactagagcagttactagagcagttgctcaagcggtcattaagcgattgcttaagtggttagttacttaaacagttacttgaacgtttacttaagcggttgctcaagcggtttctcgagcggtttctcgagcggtttctcaagcggttgcttaagcagttgctaaagtaattgacgataaagcagtttgattaagtagttaataatgatatgataaacgggacttaattttattagtagtttacatataaattgaaagtacctgctatcttaaaagttactactaccatagcaggaaatatgcctaattgtgaaggcggtactgaaattacaggcatggcagagaataagctagtaagagggggctttgcgtagcattagaagttggaataagtcgcttcgctctgcaacgactatcaagatgggcaagccccatacgtagagaaacctgacctggtcgaggttttacctataagtgtcggtcttgtacttattggactataggactcttttttagtttcatatattagattctgtttcttacttcctttccaaaactgttttgtatctattaaattatcattttttcctccgtacttgtcttcgagttcgaatccctcctgacgctccatatgttgcacaatatctgccctcggtggatatattgatatctgctgatatactaatatcatcttgtcaatatacctattgttacttcagtctaattggtcctggaataaagacttcagccgcggccaattcgacgcgccagccgagaccagcgcttggtcagcggagtaagcggagccactccgctcagcttgaagctccgcgaccagggaaacttgcatttccatcctcttcaatcgctttgtgctcagtacgtgcttgacttccgctctttattctcatgcaggtctcattttgtggctgattaactggtgtcgcctttctagttcacgccacgagcgcaaactccgacgcgcacgcttcacgagcttgaacacctaattaatcgcaaataccgaaggcgacagccctgaggtcccttgcacatcctgccgaagggaaaagactcgtgagtttactgacaggtagcgcgaatacctatccccgagtctcttcaagtctccttgcggctttgtaacatgggctgacttctttgttgtcgcctcggcgcactaattccagcgaacagcaaacttttcagatcttcgcgcaatcgactttgcatctatttcatctcggaattattgacccccaaaacccgaaatcgacttgaccatagagcgagcggtggggctgtttcaagaggtggcggcctatccagttgaatccgctctttgcgggcaggatggctagcccgttcaatccgtctgcaggccgtggcaggggaggcgcgccgggcgtgccaggctcaacgggacggggaagaggtggacatacggtgacatatgtaccgagaggttcaagtgcgcctcgcgcaacgagggctcgagggcgtggacgagggtcggtgacatggacagcgcgtggccgtggtcgcggcgcaggcgctgtgaaccacaccgcaaatggatcccagcaacctgcagagggcctcaaccctagtgttgtcagctcaccgtttgcgcaatcaaatcagcaaaaatccgtcgcatcgccgttcggcgctcagcctgcacagcagtctccgttttctagagtctcaaacagtgcttcggcttcgaacgtcgccaagaacccattcgcccaacctatgaacactacgaaacaacaatcatcgaaatttgttggcgggggatctaatgttgccgcggccgtggagcatgcgtcgacgttgaacaattaccaggaacgctttgacaaagtcagtctgcccttcctcgaaaccggacgacacgaccacggagctaacccaatctgcagctgaaaatcgatcaagtaagacagcgtgaacgagcgatcaaggatgggcaaatggcggacccgaatcagccgacttctttaaaccaggctatcacacccgtgggtacctgtaccggcatgtgccctgatttcgagagggtggagcggatcgtgcagaaagcagtggacaagtgtgaaaaggtaatggtgcgctgatctctgtctttggcgccacactgacgcgactttagtatcataatccgtcaacggaccagctggaaatcatggaaaccaagatggtgaaacgcttccgacgtgcggcagctggaaatgacgagcaattgccctcggatatccgaacaccaaagacacttttgcaaactatgaactatctcatccgttatgtgatcaatggtggtgaaccgttggctgtcgtccacatgtttgtctggaaccggacacgatcaatccgaaacgacttctcagtgcagcaacttacacatgaagaagatgtgaagatggcggtcatttgtctagaaaggattgcccgattccatatcgtgtccctgcatcttctttctagtccagcgaacacagagcagttcgaccgtcaccaggagcgtgagcagctcaacaacaccatgctctctctcatgtactactacgatgacaaccgcggacgcattcacttccccaacgaggacgagttccgcgcctaccacatcttgttctcgatccatgaccagcggcctgacctggaagcccgtgttcagagatggccaactgccctactcgcttcacctcgagtgcaggtggcattggaactatttgccgctgcatgtaatacatgggagcctcaaggtgccctggattctcgccgaccgaacgcaattgctcagggattctacactcgcttcttcaacatcatcaattccccgagtgtgtcatatctgatggcatgtgtggctgaggtgtacttcaaccacattcgtcagacagcaatccgtgcaatctggaaagcttactgccggactccgctatcacagcaatccaaaaacgataattggactgtggaggaattaaccaaggtgatgcactttgatgacgaccagcagacaattgaatattgcaatgcccagggcttgcagttcgtggagaatgcgagtggtggactgtatctctattggggtgatcgaccagttgactctgtcggtaagtggtcttaaactccatctcgaatctcgtctctcatttcccacctcaccctctccgtcgcgcctgtttatgatagcttccatcgtatttcttcctctatctttctttcgtgactaacaatctcccagactttgcaccttcaaccgaccactctttctctgaaacatacgtggagtccaagcgcgcaggacgtactcttgttgcggttatactcggcatgaacatcagagaagccgcaagaatgggtatgattgatcgttcccagttgcctcataagagtgaaaccttgcccgaggctgaggcagaagatggggatctcttcgtgagtgatattgacaatcagacacccgcacctgtggttgaaacacacaacaccattcaagacacatctgcttctgaattccggatcgcttctgagtctcagaaatgtctacaatctactcctgcaagttcgccttcactgttccagtcaaatctaccacccgccgcttcaaagtcgccaaatcctttcggcatctttcagccatcaaaaacagcatctcctccctcgaatccattcgcaacctcgatcccctccaccaccgttacaccctcagcgccgtctcctttcgcttcttcgccaaatccattctcgttcccgaaacccgagaagaccgacgcctcttccctgaccactaatgtggcaccctcgccctttcagacaaaaccccctcctcagaccgactccgccgataagccagctgtttcgtcgattggctctgccggaccctcaccgtcacctttcgcctctactccttcttcttcgtccatattctcaaagccagcgtacgcaaagcccaagacagagacagctacaacaactccacccgtgcctgaatttccaaagcccattttcttccctccggcatcgtcgactgcagacaaacccgcctccgtgttccagaatggctccggttctgtactaccccctggcccgaatcctttcgctgcgccgtctccattctccttctccgagccatcagaatcaacccaaaagacagaggctcctgcaactattcctgcgcagtctacgttcaagcccagcactttgcctcaagagccgtcgactggggacaaacccgcctccatattctcttctggcgccagcgctttcactgcgtcgtccccattctccatccccaagccatcagagccaagtcagaagacggagacaccggcggcagttactaccgcaccctctacgttattcaagcccataagctcgcctcctgcgtcgttaactgaacctaagaaccccttcgcgtcctcgatattctctggtgccaattcctttggtcccacaaacacccctgctgctccatcgctattccaaggcatcaaaccccaagagacagctgtcaaaaccaaggaacctgcaactgcgcccaatttcgggcagcccttctcgccattctcggtgaacaatgctagtacgatttcagggtccccgaacgcggctgcaaaccaatttccagtccctggctcaatctttgcggctctgaaggcaacacagccaagccagaaagcggatatcccagctactgcgcccacaccagagaaccagccatcagggttttccccgtctttgggtagtttacagtcgcccaagccgagtgagacttcggtgttcagtcactccgcacctgcgccggcccaagtacctggcgcacatcctatcaacggccatgcttcgatttcgggttctcgtcggtctgtctcgcaaactcaggcgaccgcctattcacctccccagactctttttgaagcacttcgacagcctaaaatatttgacaccacatcgaatatatactcgtctgaaacggcgactactcagccaacacctttgttccaaacctcagagcactcagtggtgccaggacagcaagggtcactgaaacgacagcatgaggccagcaatgcaaatgtgtcccctcagcacaagaggcgctcctcgctgaagaaaaaatcccccgaggcagcgtctgatggatcattcagacggtcggtgcatttcgaagaggcacacgaaaatgaacctctggcgccggaatcgcaagggcgcaagaagtctaaagtcctccaaaagaagcgagtgctggatgagcagattgagccccagccggaggaacagggtccgagtactaaggtgtccaaggtttctccagaggaagagcatgtccctttcaatttctcggtctacaaagcagaaaaccgccccatgccgaagcttccgatactggaaaagctagaagaaaaacttgcacgagccaaggcgttgtgcgagccaaggcgtcttaccgaagaacaaatccagtacatagaggaagctcgactgaaacgggctcgccaggtcgacgaggacgagattgcgctctcccgggcacgaattttggccgagaagttaaggaccggccctggaatcttcgatggttggactggaaacatccgagagccatggcacgatccaaactggaaccccatttcccgaatcgtggaaaagtatcaagcccgcaatattccccagccaacttcctatgtacccccgcgtctgacactcaatcgctccgccagaggatacgaggtcgcctacgcacctgataccccggaccgacctatgtccagaaccgaacagcgtatccggcgcactggtgcccgtgggcttgcacatgtgcccctggatttcgaacgccacaggcgagagaaagaggagatggctaagagcaagaatggaaagaaggagaatacggataaagacaaggatgaggaagagaaataggggtctccctagggtgtttaaggggatgcactacgctttcctcattcctcatgctgtaattatctcatggtgtatcttgcactgatttattctgttctcatatgggccgtggatctaagtgcccgcctactctctctcatctcacatttgcattttgcggagtctttataatgatatctttttcctcaatagacattcacagcgagaatttattcatctcttccaattactttctactttctttttctgtttatttacagcctggtttataacaggggcgttcagttacgacggtaacaccatgtatagatctgctatactataacggtagttttgttgaactacaccgtgatactacatatacatctctagacatacccaccgaccccatttagctagtaaaactacacacaacagtacaagtggctaggaattgctccgggggacaatttttgtatgaggctggtacgtgcacgacaaaaacaccatacaaagtgggccactttgtagagaccccgagtgacttttggggaggtcaatccaagttgactgtgtagtagatataaggatagaaaatgatatactgcacgaccatacaatcggcaccttccaaagccggaaccttggacgatagacaatgcacaagacataatgcggcatgtgactagactagccagccaatccttaaccgctacttgcgacgcgagcctgggatccaaaacaagccatattcgctcgaagttcggacaacacgcgatatgaaccagtgtcaaaaaatgacgcggaatcttcttaacattctcacgcgtcccttcaaggcgtttcgccagtcgccctgggcattatcgtccgcccttccatcccgaatcgacgcgtccttgctggttgaagaggagaactccccctactacgaaccagcctatttttatccggcgcggatcggtgaaatacttaatgaccggtatcaaattgcgaccaagcttggccacggaagcagatcgagtgtatggcttgcaagggaccttcaccagttcgtattagcctaatcatattttaaggtatttattgacagtttaggtggcgctggtcgaacgagcgatatctggctcttaaaattaactctaataattcccacgcaaggaaagctgctggtgacgttgagctagaggttctacagcttataacgagagcgaaccgtcaacatgagggctggcgtttcgttcgaaaattacttgactctttttctgtccagggaatctcagggagtcatgtatgtctcgtcttcgagcctttacgtgagtcactgggaaaatattgccaacgatggcaagatggtgtgatgccaccggagatttttaaaataatactccaagaaatactccaagcgcttgattatctccacactgaatgtcatatcattcataccggtaagaattctgatttgtgttagttaacaatatggttcttattcagaaacagacttaaagccggataatatcatggtacaactggaagatcatgggctcttatcccaggatgctcgagatgagtttgaaaacccactacctcagaagcattgtaatgatggacgtatcatctatctatcccggaaggactatggaccgctgaagaaaatcatcgggctgattgaagtcgtcgactttgatctagcagtccaaggtgatattcttcaagatggctgtatccaggcggaggtatatcgtgcgccagaggtcatttttgacagagggtatacgtatagtgctgatatatggagcctgggagttatggtaaacagtattcccctaatactagcgcagataactaaccattgaatgaagctatgggattttctagaaggacgaacactgtttgaatcagttgatccacacatcgttgaagactatgatgacgcaacgcatcttgcgtatataacgtcgcttttgggtcctgcccctaaagactttgttcgccgcggcaagaggacatcgatattctatacggctgctggtaagtaagtctttcgattaaattgtgtaaactaacactgcattttaggaacactcaaaagagaagaccttgtgcctagtaactttagctttgaaagcagcatctccaagtttaatggggaagaaaagaggatgtatattaagttcgtcaaccggatgatcaaatggaaccccgaagagcgaagtacggcgaaggagctactgcaggatccatggcttcacaatgattatccgcaaatataggcggagtatgcgggactgtggagtacttctctgggccattctttgacaacaacggtattactaggtttcctatttcgaacgcattattctcagaccaatgaaacatcttaggccgcttcctccttgaggaccagatccccgaccgcaaactagacgacacagcttcttttcttgaggaagaggagagggaagcatttctggatttcgtcaagggaatgcttgtttggcatcatgatgcgagaaaaatggcaggcgaactggccgggcatccttttcttcaactaaggtaaacaagagcctgatttctgcgagcgtttgctagcggaacgacttgacttgatggttgatcccagttcggcgatgccatcagatgactggttgaagcgttatgatatcgatcttgatcttaggcaactaggtgtcaccactgagtgttctacgggcgactcaccgcatatgtatgcccaggtggatgacaacattacatttgaacccttcagctattcatccatgccgactctcaaaagtgaattgaatgtttacttggaaatggtatatacactgagaaactcctcttttatagactgagcaacatcacgacgtacaagcaccgctatagcagtttgacccagaacagtagtcactggtacttccacaataaccagacgcggaacagcacgtcccaaactgggtaccagtgcaggtcttgtttccggcaaaattcgggccacattctccatttgtggacgggccgccattatcagtgtcacaactgccagaatagcagttccctgcaccacaataggtggtaccattgccgcagtagccctgtgtctattatcagcgactgcagtgaataggaaggatggtcatgaatggatactgcatcacttacgtatatactacagcagtttccgaacttgggaatacaagtcgtgcccccataatcaggtccacaggtgccgtcttgcgtcgcggtgccgttgcctgtgctgatacagtaatctgacccggttccgcagtagccaaatggcgagcagcagtcgccaaaggcacttccaacacaggtaacccccgcagggcacgtaccgtccgttgagactgtctcaggggtgacaggggcgacgcatatgtcgtaattaagccacaggttgccgcaggtggagttaaggtacgggttatactcttgcaactggctaaagttcagaccgaagcgcaggtcgatggtagaacagtcgtcaccggctacaacgagatagtagttaccgcactcgctgatggttccactttgggtcgggtaagccgcagtggctgctgtgtagtaagtaggctcgccggtcgcaccaggcgccgtgatggtcgcgttgggtttaggaaacgttcctccaggagcacttttttctcgccgagtctggttagcatcactcaatgccgcaaatgcctctattgtgtccttcttgatcttagacttaccttttacatacacgctgtcctgctgcaatccctgaacaactgccctggatattagtattccagctaagcaattgagcagtggtcacggtgtaagtcgagttggaatatctcgtggcaaggccgtcactattttcagaggacttagcacagattatggtctcgtggcttcaggcaaccattatgccctacataccaacttggtgtatcccaaaccgtatcgatctcgcatggacgggggaaacaggtagcctcgtcgaaatagcaagcgtaatccccagtggcaactctagcgtcacctgttgatatattgtacctaattgccgcatgcagcgcattagaaatcagccagcccaccaactattgggggaatgccatccatacgtatcgcaaagatcattgcaggtgagccagttttgcagcggctgcaccatttgacccagacaagtcggtgtagttgttgcggaggaacctgtcgtcgttacgctggtggtggtagtagccgttgccgtccctacgtataaggtggaggctgaagtgctgtaaggcagcgttgttgagcaatttgtttgaacaaggttgaactgatcgactaaataatccgtgaaattggtaactggtagccaaggattcaggagacgttgccgatacagattcaagaaacactcattgcagaactacgcccagttagtagacaacctcgatggcactgatgtacttcatagggagttcacataccaatttctcttcatatatattagttagagcggacatgtcatcactgatatcaccgacgtcaaaatccggatcggcacattcaggcgcgactgtgctgttgtcatcaccatcggcgaagcacattgttggatcccaacggatatagtcacttccttgccatgtctgagagaccaggaaacaccaatttgatgaactgtccttcatgcatacaagatcggaattataggtaaatgtcagtggtagcgctctcgccttgaccacgacattgccctggattgtggtctcttctgcacagactgttgcaacattatccttccagaaactaagggacgagacacagtctgtcgtgcagaggttctctacctcagcagtcgtccagactttatttattagcttcgcttcttcgttggcagacaacaacatgtttggacataacaagcttacagtggatgtctgccccgtgtcctaataggctaatagcggtttcattgcaagagacggtggtgttcctggtgaggtgttaaagggataagacatttcagggagacggaaccagaggcaagtactcacagtgctgcaagacacgtactgctcagagagagcccagcaatcaaggcgtctgcatcatagtttttgtacagcgcaaaatcggccgcagcccaagttgtccatgccgtaagcaggacaaaacagagtctcaagaaggagaataacattttgtccattgggtaggcaaggagctatgataatcgaattgctcttgcacgaggatggattggacggcatgaggaacaggaatgtccgggcacttttctctcttcctctccacacgaagggctgcttggagtgcccctcctcgatgaagacgctatcatttatcccgccggtttccccctgcatgatacaggtactaggatatttcgggcaattcggaagctcgtaccttgtgactgaggacttggtttgcttcctgttagcctgcacaaggataccggagattaggtggctgcttactcgggatatctcgtccatttagtcaccggccccggaggccagtctcttgcagccaatggccgaagcgacatgtgaaatcttcccataattgactgctagtacttcgttcaacttgggggccaaaggagatctaagccaatcggaatataaataccttatccagagcacacgtgcggggttcccactcaggaatatatcattaagcgagcacttgagtaaacggtctaaggttacatctgggctgcataagaggtttgaggtaaacaatgtcagattttagttaactttcgcagatgcttgtcatggttttcggttgaaccgagaccgaagttctcccgtacctgcacgagccatcatatcatggagttgattgtgaaagcaattgacaagccgaaagacccagaagtgacgctccaggaccttatttggcctagtactgctcttagtatggctactcctcctccaagcctcaccttccgtcaggtattagtccgctttccacaagcccctctatttccgccccggggccgtcaagagaacggatgagtacgagaacatccctgcattcacggtggtccagatctccgcggattctgcctaatggccatggactttggacttcagcccttggtgcaagcctctgcaggatccttcggggaaatagcttgtttgggcaatttggtggtagtttgaggagtaggataccccctggcgtgcatgcatccaccatcacttcagtaatatggatggaaaataaagggcgctggcgtgtgaccagcttctcgtcttctttgccgtcatttccgcccccctatctgtgccaaaagaaattgtaccctgtcttctccagaggctggaggttgttgtgccgttgctccaaagacttcaacgacaaaggtcagagtggcttttgttcatcagtccctcattgataccatttgcgtgttgagctttggcagcagcttcaatgcgaatccttctgccagcgcttcttgctctcgcaagttgcgggatttcccaaggtcgtcaacaaccccatgggaaacgcaaccacgcgaaaccattgccagagttcactccagtgccccaattgccaaagaactcgtcttcggccctgccgcccctctaccagccctattcaaagaacaaacctaagttcgaaaacgaggcccttatccggcaattgtctcagcatccagggctaagacttgaccatcttgactctggccctggctctatgcgcaaaagagaccttcccgtaggcacttgcgcacctggagtaccttgcacaaatggagcatgttgttcaaacactggcgtttgttcctacgccccctcgagttgcggggctgacgtctgcatttccaactgcgacgcgaaagctccttgtggggaatacgccaaccccgataacgcaacgtgcccgctgaacgtgtgttgttcgcaatatggattttgtaagcctcagattcgcttggaaatttctcatttttgagagcagatgctgacccttattttaccccccaggcggcagcactgatgacttctgtggcactggttgtcaggaggggtttggcggctgtggagcagctccgactccttcttgctctagtggtagcaactctgcggctgcgcggcgcatcgggtactacgagagctgggcgaccgagcggccatgtgatgtttttacacctgaagacctcgagctgacgggtctgacgcacatcaattttgctttctcatacttcgacccatctactttccagatctcgccgatggacggaaatgcggccacactttattcgcgcttcacggcgcttaaggcaaaacagccaggactgcagacgtggctatcagttggcggctggtctttcaatgatgcaacgaatacgccagacacacagaatgctttcagtaacatgatcagctcctcggcaaatcgccaagccttcatcacttccctgcgcaatttcatgcagacatacggctttgacggcgtggacattgactgggaataccctgctgccgacgatcgaggcggtgtcccagccgatttctccaatttcccaaccttcctggctgaattgagggcctcgttcggtagcggattgggaatcagtactacacttccatcttcatactggtatcttcagcattttgacgttctggacatggagcctagcgtcgactggttcaacttcatgagctacgacatccatggcgtctgggactcgagcaacaagttcacggggccttacctccgcccgcacaccaatctcactgaaatcaacgacggcttgtccctgctgtggagggccggagttaacccatccaaggttgtgcttgggctgggctggtatgggcgctcctttacgctcgctgatccgtcttgtaccacgcctaacggcgtatgtcagttcaccaccggcggtactgcgggagagtgcacacggtcatccgggacgctttccaacgccgagatcaaacgtcttctagcggccggaacgggaaccgaatcatatgatgccactgcaggagtccgctggctcacctttgatacgaaccagtgggtaagcttcgacgatggagcgacaatgcagcagaagctggccttcgctaatagcctgtgccttgggggtatcatgattgtaagagaccactttttaccacagtcaccaattgccttccttcgtttcttatttttttctttgccctctctctcactcttaacaccattttcctttctttttttggaaaacatctaatcaaggctttcttccagtggtcgatcgatcaggacaacacagctggcgacagtatgaacgacttgatgggcatcggtacagcaaatggggtgtcagaggcagctgccgcttcattcaaggagcagatggctaatgctacgctgcagaacgctgttgtatcgagctgctactggtcactatgcggaggggcctgtacgaccgggtattttgatgtaactgatgcccgcggccagattgccggcttccagcagaactccgtatgccctccaggcgaagcccagacactatgttgcgccccaggaacctcgatgggcacctgtcaatgggagggtttcaggggcgtgggaatgccttgctcaccggcatgctctgaccccaaggccaccattgtcgcccgtaataccaactcgtacgagatgaacgatggaggtcagcttgaagatctgacttgtactggtggcttccaagcatattgctgcacggaatttgtcccttcgtcgatcaccaattcaggcaacctcttgctctatggccagactcctgtgctcagcaagcgagacggttctaatcatggcctcagtctctatgtaggcgaccacgcggttgaaaagcgttctttacccttgctagtctccgggttgggcgctctctgcctcgctgacttgctcccatcgatcctttcagcaccgttgacttttggcctatctcttgccgcggagggggcaatatgcgctgctacggccgctgccgtcgtcgctactgcggccatcatcggcttttcaattctttacaacctggttgggtggattttcggcggatccccatctaaacccaacgttggcgtcccaacaacagtagcgggccggtcttcgtatggccagtggccgattctcgactttagcggcggcaccacgacgagtacctgcgattgtgtggtcacatatacgtgccgctatggcatgggttgggatgagatttgtgataaccaaaggtgggggatcgacaagctgctcaacggaaagactgtctatcagccattgccaacgagccgcgctgccggtgctaaccaaggactatggaaaggccagcgcatagaggcataccgaaccgcggcccaattaaagctcccaggcaaaacgtggcgatgtcaagttgatgagtttcctatgggcaacctcgcggaatcaggaaataacgccccgcaggcttgccgtctagtcaacggccctgcgaatgcaaaacagggaaatgattacaagatgtggaagtcggcgcagtggaaaccttgctcgacataccgctctgccgtgtgcaacagtagggacagtgggccgcctgcaacctggtatgtaaaaccgaagcttccctcatgcgatcatatctgaccttgaaacagggcgtttggggtgctacccgcgggtcgcggtagtggcagtggaaaacacttcatagatgcttatggtttcgacgagcaaacggccggctcgctttgctgggctacatacacttacaccgagcagcctggaactatcagcacctccacgcctgtcgaccatggcttccgcgttcttgatgatgatccgtatgtttccatctcccaactttactaggtagtcaatgtatagctgacaagacgatgttgataagcatgtacggtaacgcctatgggtggcctcgacagtcctggcgcatcgatccagctccattagcgaacatggcagaccggccgtatgactcccaaccgacaatattccaaagaggccttctcgccaacgacacatggcccgaggagcatagcgaccccgctggcgtctgccacgctgacctcagatcacttggcgatgacaaacaggatgcttatctcgaccttgattatgataatctcctctttgtcgatctggatggcaaacctgtcgacggtcggacatgcaatatcatctacgaggatgacgacccgcactccgaagtgcgtatcgtacttgatgagaatggtaaggtcgtggaaatatatatgggcgacccagatgctggcttgtggactagggaggcgcttaaaagttccaattcggacaaggtgactgttgatcccaccaccgtcactgtcatgacgggtgtcccggcgggcagcgagtcccgacccacattccctgcgagtacgactgggctccagacaagatcgggaaccgtagtgacacccgcgccgtatgtgtacggtctttgacagcatcaaccatgtcaatgacgaacgaaaccttggaagctatgggggtttataaatatatcatctgatatgacgggcttttggctaggttgggaagatatgaaagaaaatggaaggatcgagactaaatttgtaaataaatcacaatcgtttacgaaaatggctatcctcgtgactggtttcttttgaaattgcacatccctcttcggccctggtacctccatttccgcaggatagagctcggaaatcgtctccggattgaaggcaggatggcactgggatatctaccatgtgggagggatataataatcctcccaacggtccgattcagcatctctgaaagtatcgatagtaccttctaccccttccggcccaatagaccagacgcctttttcaaccagcttgcgccaacaatccaacaaacgctccagccgctgggggcggtagtagtcaccaccaaagggcttgaatccatgctgaaagagctctgaaaagcgtcccctatcaacaaactgcccatcgctttttcgtgcgcctactttcctgctccaatcatcattgaaggtgaacgggagcaacagccgaaatccctcctcggtcggttcatcaccgtttctctccactgcctcagtatacaggcctgcagagacgcgagacggtgtgcacgttttagtgcacgttgaatagaagtccgacaataaccatggacttgttgttctcgtgagctggataggacgctggtctccggtatcagcgggaaaaagacatactggtggtgcggtgtactcagagcggggtaatacgctgaatggctgcgctgccacaaatccagccgagtcagcccggggcaggagaaggcccggagcgatgtagtggaaccagggccgtctcgcgcgcgtcagaaacaaacgcgcaaaggagggatcaggcaccgaagcggcgtccaggacagttgatgcgaccagtggctctggattatccgcatcagtcccggaaatggggctgatcggtgatggtgggttcggcagctgcgagatgcgcgcctcaatggcctgacacagccgatcccactcggcgacacacgtagtaacctgggcttcgctatagggccgccactcccagggcccgattttctcaaagtcaaatagggctggctctttcttaggcgaagccacaacttttccaagatgaataaggtcgatccagtgggtgagcagtgtctctagtgggttccaaacgtatcgattatcctcaactggaaacccgtaatcataggcatcaatatgcatgaagatcgcgacgcgatggaagcgttggtggtagataacactgccactaccgtctacatgcgatatgacagcgtacaagcgcatcaggctgtcaatcggctggtcatgcatatcagcttcagcttcctcaaaaaggttgtttggcccatcgataccccatgcaaaaacatagaacgggaggtattcgtgaggattatcaaagggaaaaggagatatcatagcggtgtcaaggaacgccgccagtgacggatcaagccttggacgacaagcttcagcttcagcttcatcaccgaaggtcgtgaaaaagttgtcgttggcattcagagttgccagtgggcggccttcagcgagccaggcatattggatcaggtagttgtgtagagctgcacatcgtgcgtagtccattccttcgagatcatttcgtggagggttatctggcctgacaagcaggctggtgatgtccggaagttgagaaagatccattgagaaaaggggtgtgtggctgtcaaaggggtcaatatcacagcctctatccaaaacaccgaggaccagattagaaccctcggtcgtcaataaaggacaatgtggtatgatgaagtgttgaacctgttgagtgcggttggtgtacggaattagtaagctggaagccgtgccttaattctactgatcagctttgatttcccacatgtgcagctatcatgtactggtttaccccgctctcaggtacgaaggtgtatagcggccaacagtcggatgcctgattttactggttttataggctaattgggactagctcttaccatttttagaccgcctttaactcaatagttacatatgtaccatcttttgaaagtactaacagttccagagcagatactggaggataaaagcacatgacagaactctgagaattatggtgccagtgtcaggaaccagaaatttgctagaagttgaattgctcgacatagcaagcggatattattcgaagaactaatggtcggcttactttaccaacatgaatttgacacagttcaggtacgcggctctatgagtcggatagtttatgccgctattgttcgttggatggatggatggtttcatatactctggcctcctgtttttagcctataatgcaaatacatgattatctccaccaggttgttccatatttcctacgatgaactttgagcctcaccgtgaaggcctgtaaagagtgagattgacagtagtcaagatgtcagaatatcgtaatagtaaggtcatggaagtttgagattaccgtcaactttagtgagtttctttagccctgctgaaatagaaggcgctagtgacgaggaggcgcggcgaaactagtccggtatgcatctacaaatatgcagggccagtaagtcgatgtatatacgacattgacaattttctttaaaactgtctcacggagttttcaggtgtctcggtgcagactttttgatctcatattactgtgtctgcttactagacagcatctcctcgaaatatatatttagacgctatcggggaatgctatatccgaatgccggggagacgtcattagtgctttataatcaactttatgcatggcctcgggaagtttaactttattttttctcctatagttttgctctctaccgctacatccttctacctttttctatatgatactttcgtggtaattggtattttggggtcttctgctttttttttttctctctcgcggtaccgctagtagtagcaattacgagaaggacaactttgattcttggatcctccacgtattcgctgactaaggcccgactctacgtcacctgggcaggctacgccacctcgtccagctacttctcagctcatccttatcgcaattaagcaccccacagcttcaatcaattaatcgcaatggcagagaatatgaaggcgtggcagcaggccactcctggtcccatcgaggagaagctgaatctcgtggacaacgtcccacgccctaatgcagccgccctcaagaaaggcgaggttctcgtccgcgttatcagcgcttgtgtcaacccggcagactacaaggtcatggaggcgggacttctcgcccgcgccatcgtcaagttccccaaggtgctaggcatggacctcagcggcactgtcatagccgtggctgagggatcgacggacgtcaaggtcggcgataacgtccttggccgcgtcgaccccgttaagtcgtacggttccctgtcgcaatacgtgctgctgcaacgagatggatatgccgtgctatccaagggcgtggatctcgatcgcgctgctgggttgcccactacggggttgacggcgtaccagtgcatcaagccctatgtcaaagccggtgaccgtgtatttattaacggcggttccggaggaacgggaaccttcggtatccaaattgcgaaggcccttggatgtcacgtcacgacatcctgctcaaccgccaaggttttcctggtcaagaaactgggtgccgacacagtacttgactaccacaaggacgatatcgtggctacactccaagctgagggcccagtctacgatctggtggtggataatgttggcaactcgccgaaagtctttttctccacgacgcctatgtttcttagaccggagggtcacttcattggcgttgggggctccccatcgctatctacggccaagaatatcgccaagggcctactgttgccggtcgcactgggtggcacgccgcgtaagtttgtttcatatctcaccaagaatgtacacgaggacttcgagcagctggcaatgtggctagctgacgggaccataacaacgattgtcgagtctacctttgaatttgagcaggtaattgaggcctatcagcatctgaaggtgggctccagtgcgggcaaagtcattgtacacgtctcgctcgagatgtgagggtgctgcacctctacaaagttcaatgaacgatattcattagattcttattggatcgatagcaactgcctacttcgtgagctctgaaatcgacgggctgtattcctagttgttgtatttgcattgtttgcgtggaatctttcttacaggtatcataaagagaagctgcccatcaattgctggatatatgttgaactaggaatatggcccctctaggccctaaacaggaaccgaggttttgttatggctgtaaatttcatattgtaccagcgaccccccctcctggccagtccgacccccctttaggctatgcgatccttcctacctgatagttcaggcataagctgaccgcctaacgtaatcggtaagcgagtggatcagacaagtgagtggatcaggcaatgcaaaacgcgtccatcaattagcacttagttaattcaaccacccaccatgccaccaattcgctcccaatcctctgcaaattcaacagagtaagagggtaggatcttattagctattcaggcttttcaaaataaagaaatctcttcaatacgcgaagcagcacgccgatttaacgtccccttctcttccttacggaaccgccttaccggcattaaaaatcgccctgaatctcgcgctaacaaccataaattaacagaaatagaggaggaatctctttaaaaatgggttctctctatagatctacgtggagctgctccctatccttctatggtttgagaaatggctaatcttcttctttaatagcgcggaactaccctagttctttcggtcggtaagaaatgggtatataactttgtgaaacggtatcctctcctttcctcccgattcttaaaataatataattataagtatacgaaatataaagaccctaaaatcattagggaatggtttaatctagtttaaaaaactattctttagtatagaatcgatctagatgatatttataacttcgataagacgggttttactataggattgactataacggtaaaggttataactagaagtaaatactatagtcggagatcacttctataacctaggaatcgtaagtaggtaactgtaattaaatatataaatacttctaggtaggcgcttcctctatatatgatttttaaaggtaaagtctttattaaatcttagttcgatagcctcctaggagattagcgctttaaagtaagtctaaacggttagacttctaataaaatctaataaaattgggcttcgctagctttaaaagctctttattctatcaacttttctacggttaaagggtcggtatcggcttctagtacttaacggtcacagaagctatttaaccccttaattcgactaaatttacgaggaaaacgatattataccaatttatatactaccgcatttatcttaccttttacaaccgcttgatatcggctgttttgcggtcctaaaacgatcttatagtcggttagttgaaacgaaaatacggaataggattaactatattaataaacttgactttctcgaagtatacccttctatataaattaaagcttttaaaccagagataatcaagaatagcttcttagtagctggtttagtaccctttttacccaatagggtacttttaaaactaaatatccggcttcgaaccctaaccccccctcctagccgggatagcgattgggaccctaaaactcccttaaactatatatagttacaaaagtaagctttatcaattaaagctttacttcgtataagattaagaagccctccgagcccattatactgcgcgataaatcaagttttaaaagcctactaaatcactatgcaatccgccgcctttcttaaaaaggaagtaagtgaattacgcgctgccaatgagaagcagaagcaaaagcggacccgatctataagaacgatagtccatgaaggagatctctcagttcaggaggttcgtgagctacggtcagagccatttaaggcctaagtagcgcgtatcaacaactatcgtgagcaggtttcagaaggtttacaaccacctccccgggccaggcgattgtatggaatatgtaggcagccaggacatagaagagagacatatccagatagatgatgattttagtttatttaatttaatggcgttatggtcgagataaatgcatttgaattcaatgggttacattgcctgatccactcacttgtctgatccactcgcttaccgattacgttaactagttaactactaactaactaactataaagtttcaccactttactggccgctttgcctacgatttgcagctatttgtatctttgctagcgagaaggtttgtagtttgcaacgtttgcaaagggtcaaccatacaagcaggccgcttctcactttacacctgcttcttctttctctccatcttggttatttttgacacgtgacgtactacgtcacaataagttgaggatttcttgtattaacgaccttcaatacatagcttatagaccttaggcattaaaattgaggaaagaagcatgaaattgtgagcagaatggtacattctttactatgtaaacaagaattcaagcctacagaaaattcaagaaatgacagaaatagctgatgcctaaagtctcgggcatggggtggggtcgctggtacaatcccctatatttaaacctcccctacgtcatgatacttttccacggttggcccacttatcaagtcatcaagtgccagtgcaacatatataggtccacggggtacaagagaaggtactggaaaagctatctcgaaagactaaaaagacacgatcaggccgcatactgtactgtactccgtacctatgcaggaatgagccgatttatcacgtgattggtttaaaccacccctttccttcgcagggcgcttcatggatatttcctcgaacaatcaacataccatgttacgctgctcgaaaatattcgcgcgccctttaaatctcccaataacactggcctcgcctcgaccttcaattccagtattccaatccctttggcgtcgaaagctcagctcggtgtccttcgcgcccggcagcacaatggctgccaaccatcacgccgagtatgactggatcgaggacgtggagcaacttgaaaaatatcagcctggaggttatcatcctatcatcgtcggtgacgtgttacatgaccgttatcatattgtagataaacttggctttgggggctattcaacggtttggcttgcccgagatgctcgtctagagcgatatgtcgctctcaaggtcaacatatccgaatcgattccgcgcgaggccaaagtcctcaaagctctgtctgctccgcctccgtcatcttcgccggtacatcccgggtatggtttagttcctgttctcctagatgaattcgaagtgcaaggttttaatggaaaacatacctgctacacggtgccccctgcgcaatgcaaccttagagatgccgcctttagccgtcttttccccctcgatgttgctcgagcactatcataccgagtcgcacaggccgttgcttatacacattcacaaggctatatccatggaggtttgtcataaggatgactatctattttggatactagtaagctaatattatttattgatttagatattcatttaagcaacattttggtcaagctcccgtcaagttttgataagctctctatcaagcaattctacgagaaatatggcgagcccgagatgatccctatcacacgatgtgatggagcgccattaccccctaatgttccggctacggctactttgccgctattcctagggaaatatgccgagaaatttgtattgtccgacgcgcacccgcttctaagcgactttggtgaagcgttttcccctgcttcagaaatacgtcttgggcaagactgtcatacgccagccgcgtttcgggctccagaagccaagttcgaattgcaaatcccgctcgcctatccctcggatatctggagtcttgctaccgcaatatgggagattatgggaataaagtctatctttagcgctgaatatatgcacgaggatgaggtaacggctcagcaaattgatgttctcggacctatgccatcggagtggtggcagcgctgggaaggacgaccccaatttttcgatgaccatggagatccaacggagtcttataaaagaaacaaatggcctccgcttgaggaaagatttgagatctgtatacagaaatggagacggaagtttgttggaagcgagattgaggaagacgagaaagctgcgtttctggatttgatgcgccgaatgctatcattccggccagaagaacgaccgactgctgaggaggtgttaatgtcagactggatggtcaaatgggcattgcctgattgcgagcggagctaaagggattttcttgtgtttaatactcaatccatgcaccaatagtcagataacaaggactgatgcacagttccctgcataaactggatagcaattgagaatcggaaagtttcaaggtcctctgcggtagtatatggccaatatatacatcggaattctttgaaacgcgcggatataattgcctggtacctaacattgaagaaaagacagaaacacatcaacatcgatatcgaaacccgcgaggcgtgaaaggtccactcttctgtgacattgaattgcaacagattgacattttccaccagaggcggctccttgcacctgtttagcgttgacctgctatgtgcgagtagccgataggactgtccgtatattcttcaagtgactcctcgtctggccaaacaaccttcctagacttcggtccgccacgtttaatgccgtccgccttctccggggtatgagtagcttttgtaagagtatattcctgtttgccgttggtatacccgtgggacgccacatggtattcacgttcgagttgaccctcagtcttgaaggcgaaagtcccgtgccagccttgaggatctatgacatgcttgcccatacgggtagtggtattgtgtaacccagacctgattaataacaagttaaataaagtgggccaaaatatacatatgcacaaggctttggcggggatgggcatttgtctgtgtatcaaggtagaaaagcagacaccactaaccgaatcaatattgccttaggcgccaggaatttgtctcgagctgtcgcgtaggctagggctaccagcgatgccttcacttcggggctgatattgctattaaggtagaagaagattcgaacaaagttgactccctctaaagccgccatcgcttcaacgtccagcagaatagataaactgctttcacgccgaggaaactttgaaggttgtgggttatagcaaaggcatattccgttgaggggaattattgcctctttatatcttgctacttccctgctagagatagatggagaacttgtccacattgttgatcacatctattttttggtgtgatgaaacaagtgagcggctagagagctaagtatagaatatggaatgttggaaattcatggcgtatctgaggtgctcgttaatctcggcgctaaattctggccccaggacgtgatgggtggtttgtacatcgtactagcgtatttcaatatgtgtctaggccattggtgtggtcttaatgctattcatagtttatacagctctaatatctattaatgtactctgtagctttgaaattgaaaaattcagctgaaatctatgaacatcacaatgcttgtgctggtgaatctagagaggccagatattcacccctaaggcatcaattttcatgacccctggccaaaacatcgccctcccttcgaaaactacaccaaccacggaagtaattgctcttgacttggactcgaaatcacaatatataaatacttgtctcgagtggatctggatctagtccaaggattccgacccgcccgtcataattctgtcgaaaaacctgccccgctgtgtccgcggtgggaccagaagacgcgaacttcatacctcgaccacgtcaagaataccattgagttcagacgtatctctttcacgactcactaagaaactcctgattacacaacgcgtgtcgcttctaaaattcagaaacttctcagcctcaccgtctcacaagatgaggattgcaacccttcaattcgcgccgaagctaggcgacctcaaaggcaatattgagaaagctaatgccttattaaagactggaaagactgtcgctttagatggaaaagagcttggggtcggggtcgatctgttgaagcctgatatcttggtgttgcctgagttggcgatgacaggtacgtactccaacaaactcattgagcagcatgaaccccgtctctagcatttgactcaacctgtgtaaaaatttcactggctaacgaataactaggctataacttcccttcattggaagcgattaagccatatctggagccagctggtgatggcccctctgcctcgtgggcgcgtgaaactgctagacgcttgcgatgcaaggtttgcgtggggtatccagagattgaaaaggattctcaaaatcccgacaaagtcacatactataactcactccttgttgtcgacgagaacggggagttcattctcaactaccgaaaaagcttcttgtattacaccgacgaaacatgggcggctgaaggtcaagttgagcgagggttccatgagcttgaattcggttccaagggcgcgttatcttcattgcaccagggtgagcaagttctatccgagaaaaaaaagatcgcgacttcgtttggtatctgcatggatatcaatccgtacaagtttgaggcgccatttaccaaatgggaatttgcaactcgagttcttgactccaagtcccaacttgtcattttgtccatggcctggttgaccactctgagccgggaagagctagatgccttgaaggataagcccgagatggatacgttcaactattggcttcagcggttctggcccctgatacaaaaaaggatggaacatgaggtggatattgacggcggagaggcggcagattctccgaagaagatcgtcattgtcttttctaatcggtcgggcgaggagccaccggcgcggtatgcggggacaagcgctatcattgctgtgacgcaacggcccactgtcaatgttgatgcagggtcaggtgcgcacgcccccgatgaggaaagtgagacaaaggatgcgggcatcccattcgacatcaagatactttgctgggacatgctaggcgccgcggaggaaggtatttgtttcgcggatactacggcagatccgcaaatggtatttgcactgaaataggcgtctgagtgaggagcgcactggacgcgtcagactattccacagataatgcagagtctatgaagtgatcgagggccctcgcgacatgacattaggaaatggcatttcgatcatccgagtttctgtcatacctcccactcccagaatatacactaaacggtgtatatctcagtttctctcagttccatggcgatcctccttgcaatgagaactccaccgattgccacaggctcatgtacaggtgatccatgtgataggggactcaaaacgtgatgacatatggaggaagatcatcgagatcgtcacaatcttcaggaaaagctcgaatacttagcttaatatcgcatctggaattgtgaggtcttatgatcactcgatcttcacgttcatcaatatgcaggcaagataccagggaagacccttttggatatccgatgcaaccctttggagatatggtggtgtgaaggtcttggggaattctatttcaatatgcttagtctgaaacatgtgattcacctctcccccaccccgatgagggatcagaagtaaatcgagaactaaaaacgaagtatgctgagattgtagaagaactcgtgttatatcacgatctagaccagcacacccaccacataatgcactactttgtttcccattgcaccaccgtcccgggatattccccttttgtgtttcctgattcagttgaaggcagtattcgatacactagccggtctagctaatcactttgcagggaaacaaggagggacagtcgcttccgatcgatgccgggtatattgaatatagttagtaggcttgtggttagtctagactacgccgctatacttgccaaatatgtgaattcatgaagtcctttgtatccgacggtctgatcccccccgtagtgggtgaacatagcccgtgattggcccagaagatacccgtacacgtgatctaggaaccccctccgagagccggtggccaatcagagacccataaaggaggtgtgcagcagaggggcacgggacggctgcacatgacttgcgttgagcgatggaggcgtagaatccccgggggaatccaagcattttagttggttatcttcagctcctgctgtcggtttcgttttggctgcgtttgcaaaattgtctagatcttcagggctcccaggtggctcattcgcggtctgcggtatgcttacgtcagtcgatcttttggaatagatcgatcaggtgattcactgcgctcttggtcgttctggcccgccggactcagcgcgactcctcctcttgaaccacctccttgccacgtgagcaatccatcttgaacttatccgctactctacatcttcctaaagaaacacgctttcttatttctaaatttaccgcgaggtagattgcgaagtattttgcatctcctgctattggcttcttcaaattttcatctttaccaattcgcgcgtctcaatttcgaattcggggtttcgcagacaacgtgacctgcgtcttgttgttgtcaggcaggtgacttcctgtcaggtgataaagagagatcatcccaaggtacggctccatcaatgccccatcttcatccagatttcctcatgtcattgcacctcgcgtcgtgatgtttatcgcaagtggtctccttcacgatgctgcccccctgtgtgacctcatctgcctgcaagccatcatgacgcgctcctgatatctgcaaccccgcggatgtctcgaggcatcgcattacatgcggtcgcttgaaacgtcactgcctcgtagaactatccccatgcactgccgcccgctagaataagactggcgatggccgagtccgacgcctcccggggatgccttacgagcgcgtcggattcacgcgtctgtttacttcgcggggtgcccactatcttcccgagggacttgatctctcaggcatcaacttaccccaggctgcattgacattccagtcatattgttctcttctcattctccgagactcgtttgtttcacttctggacactaaccattaccactaataggacgatccgctttagcgcttagcatgtctgatcccaatatgaacagcccggataatggctcgcacaagcgcaagagagacggctctgaggatctaggcgctgactcgcagcgacttaaccgctcttcccacggaagcaacggcagcatggataaccagcacaacttcggccatggaggcctcggcaactacgaccacgggcttcccaacaccggagccgaactcaacattgatcaacaaattcttcagcatgttggtccgcagaacggcttgtctgatgataacgcgttgactgccaatgctaaggccgccctggcggcacacacccctcaacacaagtacccccctcctcccgattccggcttcgatgcgagcaacctcacccaagggttgtcctttggcgatgatatgaaccagactcccatgggtggtggtcacaaccacaattcgactgctgctgcggtctatgccgcgcgcgaggctcagagtatgaaccagaagcctaccgttggctctcccgaatggcaccaaattcgcaagaacaaccacaaagaaggtaacaagaatccgtctgatcgggtcttgtttgcattgctgacccatgccctagttgaacgtcgccgccgcgaagctattaatgaggggatcaaccaaattgctcgtcttgtgccgaactgcgataagaacaagggcgcgatcctccaacgtgctattgaatacatcctgcagctccaggaagaaaagaagaacattgacgagcaatttgagaagcacagtctgactgctaatcatgccatcgctgagatcagcgtctcgaactccaaactcaagggcgagctcgcccggcgcaacaacatcgcccacaagtggctgacacgttgccgggatgccggcctggaatttgatgattacgaggagtccaaagagctagagtcactcgagatggattaagcttctcagcctaattcttctgcatgtgctacgacttgttgcgttccggaggtcaggatttgaacataccctcatttctctgttttttcaatctgctttgacagatcttttctcttactaccatggatgtttcctccagatcgatctcacctcaccatgaacttctcattactacccctcctgtttcctggaaatgcgttcccctggcattcattctgagtgttacatttcccattgactacccttgcgacttgtctgcgcaattttttccttctattattgctttcccctttgatcattctctgctcacacatttgcggtctttgtaccttactcgggctttgttctttcttttttccctttcatcattaatggattgtgggctggcgaatctacggctgggatgggttgccttgggatggagctgcgggttgataagtcctttttttcgaaactgttttattaaatctctttccttgtaggagttgtgccgtatttgtttaagcattgggataccttcctatccggggctgaggtggccctgaactcgggaggtcccgagcccgagtctcacccgcccctgtacggctctgtacggttaaagcgtcgcacagattggctacgtttaatgcacaatctataggagaatgtattggctagtttctgaactccatatttcggggctttgctttgcgtctgctagtcgaaacaccgaaatcacgggggggctccgcttccaggcgcaatactatacatggccatcaggaggggtgttcctagtatcgccgacagcatgtttgtttccttatgcttggaattaccccaaggaagtatgtgcacggcaccccaggtttcaggactccatctccttcgtgttatcccttgtctcgacagtgatgttctattaggaaagacgctttcatgaatgcgataggacaactgataatttgggcagatgtgttgtccctcggtgggtttgcatcactagcgactgcaggtgcccaaaacaagagcaacaagttctatgaatatctcataaggcgtcattgaagtttagcttcaaacatcaacagccaatactatcagataatcagccaccaaggtcatgtgcggagataacacagccctgatcagcttagatgtcgaactacccctctatgatgtcaacgcggagatccacctcctcctcttctacttaaatctactttctcctagtctcaccactacactacatctctattaactatctcaacatgccttcttcctatatcgtgagctactaactaacacatcccaaccatccacatcttgctaaccctcctagatcacgtgcaagccagacgcaactgacgaggaggtcaaggcgtatgcatctcacgctggtattcgagatacacacacgatgctaacacatgtcttttagcgtcaaggaacatgccaaggagcaaggcggcaaaattggacacgagtactcgttgatcaagggctttgcgtgagttatccagagcactctatcggtcttccagagtgagataggctaattctcggtcttggtgtttacagtgtttctttccctgacgggacagtccacagtctggactcgaaccctcatgtcgaaaacgtcgaggccgatcaggaagtgaagacacagtaatcatctgtcagatgtgagattttgcggacagcatacacagccggaggtcagattcgttagcgtgttgtatcatggcctatttgggttatgaggtataccactgagtctttaaaccagccaactacggatttatgaatagagcaaatgagctatatgattcagacagtgtgaccttgtagatcgacattactatagtagacttggataacccctaacacaggaatgaatccgttcaccaaaccaccacattaaataatatcaacagaagaaagaataaatataaagcgtccgcgctcaaccaatttacaagttcgacgcagcagtaaccgaagtgccagacacaaccgcgacatcctgaacaataacagtattgccactagcaccagtaacccgcacatcaacagtgctagtcctgaacccagcatcgtactcgaagaagttgtagtacgtgcgggttgtgccctgccacgtactaccaccgtcggtgctaacatccaacgcagtcacagcctcgttggcattaacaacctgcatcgagaaccagtacgggccggtgccatccttgttcttgagctggaggggtccgtccaggtcgcaggacacgtatgaccaggtcgtctcgatgacgccgagggatgtgtctgcgagctcggcgaaggcttcgtggaagaggtcgaggtggtcgctttcgcattcggggcattggtcgacgatctggtttgggttagatttagttggttaggacgggatgggagggatgggagggggcttggcttaccattgcggtgatggagttaccactcgggccggtgacggatacacaggtgccgcagttggctgcgtcatcccagcgctggagggagagggctgtgccgaagaggttgctcgggagggtgtagccggagaacgagcatgttccgccgccgacattgccgccgtagaaggtggcttcgccggcaatggaggcaccgagagatacagagacggtggaagaggaggtggtggaagaggcggcagcggaggagctagtggaggaggatgtagtggaggaggaggtaacagaagaggtggtagtcgaagaggaaacaatggaagtggtagaagtgctggtagcttcgacggcagcctgagtggtggaggtctgcgcggcggcgctcttcacgacgggagcagcaatggtctggacaacagcagcagtctcagttgatgcagtgaccacaactgagtcggtcttggaagctgccttctggataaatgcggtctcggcagcagaggttgacgaggatgtagtctcgactgggacaattgaagtctcggcgacaggggctgaagagaccgaagaggtcagagtctcaacaactgcgctctcaacggcagacgaggaggtagtgtcgactgggacaactggggtagcagaggccgaagaggtcgtggtctcagctgggacaactgtagactcgacagtagagactgaggaggatgtggtttcgactggggcaactggggtaggagagactaaagaggtcagggtttcaacaactgcgctctcggcagcaggggccgaggatgtagtctcgactgggacaactgcgacaggggtcgaagacaccacggcaacggcagtagacgacgaggctactgtgggctcagcggagggctgagactcgatgctaaccggagtagccgtcggggtaactgcagtctccacagaggtcgccgaagaataggtatccacagtgatggtcttataatagacgctcatagtatagcccttcgggcagaatccgtcatcttcgcgggcgcgcaatgggcccgcagacacagtagcagcgctaagaagagcggccacagaggccagctgaaggtacttcattggatatatagatggaagtaaagaatgaagggttttgcaagacgaggtattgaagaccgaatgaatgaatggaagccacaggttgactcttaaaaaggacaggacgtgcaggtgcactttaaaagaatggacgtctggataaagaatgccagattcgagagaattactgttccagacagcaagttgggagtgagagcgaaagaaggtatgaaaggggagaaaggatgggataggttagatataagtctaagggacctcatactccgtaccccgtggcttgacgaactagtaatttgatcatttcatagtaagaactacacgctaaacatgaaacgaggcgtgtatcatcagccagtgcaaatgctccggagaagctggaaggggtacttgacccatttcactaggccgagttagggctagtgaaagttgtttaaattaaagagggcaaaaaagaggaaatgactggggtcaaggtaaaatgagattctgttctaaggctattagtggatttgccaaagccaatcggaaaaaaaaactaaacaggactaccgagcatcccacataatctcgttcagcctcagtaacgcatccgcactagccttcttcgccgacataaactcctcgcgattctccgccccgcgtggaccacggagaaattcagagaagcacaggtcgacgagaacacgcagctcctcgtatgtaaatggctcgccgttcccagcagccaaggctttggcgccttgtgatgcaaaggcctccttctcttccttggcgtagtccaaggccttctccgcgccttctaggaaccagtccaggaactttgcgctgcgaggtagggcgacgatttcttgagaagcttgcgcgtgcaaatatgtagccgaatccggcgaatcgccagctggatcgatgatgatgttcttcaggttctgttggagaacaagcacatcaagctgcagtcgcagcgctccattctcattcatggcgccgatatactgggtacaggcgacaaagacccggtcgataaaccgtgccaggcccgatgtgatgaaccagcgctcaacggatccgagatacgtcgagatgttggtgtcgaatgcgatgagatcattgttgagtgcgaggatcgtgggtgatgcagcggttggttgattcatgataatgtgccaccagttgtctattacgtttggggatggagtgacgggttcagagttccgcaggttaggaggattaggcccagccattgttttagtcagcatgtgaatgatgccacagcggatgtcaacatgcatcgtaagaagtgcagtatccgcaagccggtgtaatgagtggatagtcccatcaaaggccacagcagtctcttggttgagtggcaaatgaaccgggttattgatgctatcacgattgggcttcatggacccgaacagagtccatctgcgagacggccggcctgttgcagtcagactggacgactcggaatccgcggtatgttcaaccacaagtcggattctcgcgaggtgacttgcaagccattgcatgctgttgtacaagagcgaaagggaaatgacggttttcgggtcggatatgatatcgtaaggctccaaaggcacttccgtcgttcgcttgaggagaaggtcgatttccgtatcaatcagagtctttttcttgtcccccgcacctttccacagttcatcgacgacatcatgaatgtcgcccgtctcagcaaaggcagccgctgctttcagtcggacttcgcctccacggttccgtgcagagattttcgtgaccattgctttgtaccacccacaacatttgtcataataggttacgatctggtcaataagaagctgcgtaaacgcttgatcgtgtggaatactggacagcattttgctaaattcccgaacaatggacatgaatttgaccgttcctttgaaaataggccgaggggaggccttagcccaatgggggtcttctgtaaatgcatctgcaccaatgaagctaagtgtgcagagatccgtcacagtttcatccaactggggaaggaagacattgaccatgaagtcatccaaaaaggaggtcaaagtgcccatagaaatatcggaatcaacagggacgatatccttgagccgctggatgaaggatagagagggaggaagaaggattcccatattgaagacacttggttcaagcaagatcttatgtccagtacccgagttgccattagtagggtgcggagtatcacttgttgtagccttttgccttgacttggaaacaagtccaggcactgaggacttgagaatctcatccaattcatcttgctcggctttcatctcagaattatgctcaatatcggacaacttgaacattttctataacggaaagggtcagctacttgaaagtaatgagaattactggcctacttaccttattcttatcgcggttgcctgtgtattgatgatggcgagggtcattttcctctgttctagatcgaaaagaagagtccccatcggttgcgaggtagtcgtgcatgagagaccgtatctggcaaagcaaattaatatttgtaatgtcagtcaaagctgttgccttacctcgctttgcagaagtttccacaactccttaaatcctccagaaagcgcctcgcttttgattagaccttctcgatccacaatggcggcaacaacatcatgaacaattcggtggccttccacaattgcctcaaacttggcatataaagcccacaaaaactcagaaagcacgtggccccgtttttcaatgatttccgtagggagactggactgtttgtaattgtcctgggctgagaagctcttggttggctcaggatagcgagtatcaacctctccgttcgtcttatccactactgcaaacagttcgactggaagacgctgctcaattctatgaactgcgacgtcaagatgtcccatcttgttcagcgcttcgatcaataactggatgtaggagaacgtgtcggcctccgggttccgggaggcatcttcgaccataggcgtcaacggatcgaacttggccaggaaactatacacaggccgttcccaagagtgactaccggccaaatgagacgtatgcacatcttttccatcagttgtgttagctttccatcggtccgagcaatagggtgatttaaggtatagatggtcgtgcaactcctcgatcagaatgtctgtgagcgacgtttcctggttgaggaaataagcacgaatatcggataaagcgccgatttcctcaagctccgaacgccgtagaactcggagagctgtgtggagcacatccacagctgcaaggaatcgcttatctgaaatctgagtttccaatttctcgggaagggattggatttcctcaatctgagtgaacagctgtacgatatcatcatagttctgagaggacgttgccagtcctttcaactccggtttggtcgatattaagccggatttagcctgatctagggcatttctcagactgcgtactcgattttgcgaggaagctatattggattggatcttgtggtatgttccaatagaactgttgaatccctgatggtgttctatgacatgcaattttagcatatacatgtcctaacccccacagagaggacctaccattgacaattgccttcagtgtcttctggatgtcattgtacatatgcaaaaattccggttcacgatctgccttgcccaatgtgctcgtgtccatcagactcaaagcgacgtgtactgggacacactcggcatcggtcatgaaatcccagtcgcgctggatagagtggagaatcgctgtagaaggtaaccggattagctattgggccaggttgagcaaaagagaatgtcgtactttcgatggcctgggtttcccccgagtcattgctcactttggccacaggcgacgcattcctctggctcctgtgttccatttggcctcgtgggtccctttggtccctttgactccttccatctctctgatctctccgacttgcatctctagaccgctcttcccggtgcttcctgtcgggatcttgatttcttgtgcgtgaccgcgaagaggctttcgcagagttcgatgagggatgcggggaggggttcgaagacggttgcggagagggttgtcgattcgttcgatcgcgccgtcgatcgggcgactggctcagcgcaggagattggcctggcgatagatccgccggctgaggcgtgtcagcgtagaaaccaccgtatccgccgggccgacgatctgaatgtccacctccacctggtggtggtgcggcacctagtcccccgtatccggttcccccaggattgctgtttgaactgtatcccccatcgttgccatactggttgggaccggagtagccatacccgttaccataaccgctttggccgctcatcgccaatgatacctcgcaatcacggggtgttccggttcggtatggaagcgttggtgggctgtaacaaggggctggcgtggggctgttagccagaaaggttcggtcttaagtctggtgactagcgcgcgacaattggcggggagctgcgagcattcttgggtgtggaatagagggagcgctggaagcaattcagtggtaatgtggtgatagtgttgaaacacgccgggtcgggctccaccagagcttcccgcattccgttccactggccagttgtcggtttactaagaaactccgaaagttgacaatgtaaactgtagatttgcagtatatcattgtgtcgttatgttccttgctagcatcatggtatttggtatttgattaaatcttaattattcatgtctaggtacagcactgaaatggtgtatacactactgtattctacataatcccttctaatcaatagcaggagtactccgtggctatttcaaaccacggcgcatcaacgctgcataccacttatttggaaattggctgggtctcacgcttgagccatgagcgtgtcaggtcgtctgactggaagaagtgctctgtcttcgcccatatctcagcgtggtagtcattcacccacttaagctcggcgtcgctcagaagcgacggctcaatcaagttacgaccaataggagtcattgtaacatgctcaaagcctagccactgcttatcaccaaagttgtgggcagttttgacttcgcgagccatgacaatgtctataaagagcgggattagtatttctccaataacagtcacagactgtacaactcactttcgattcgaataccaaatttgccatcctcgtagtatccgggttctatatcaggaattagttttggactgcaacctacggggaggagagacaaaccatcggaaatgacgtttccggccgcaatggggacctcggtatactgaacccgagttccgataccaatgggaccctcgtggacattctaaacaaagataagtaaagtgtaagatgtttgatgagcgataatactcaccagataggagccaacaccatggcctgttccgtgaaggtagtctaagccctctttccacaagtgttggcgcgccaacacgtcaattgcaaagccactggtgcctttggggaataccgccatatcgattccaatagttcccttcagcactaacgtgaaagcacgcttctcgaactccgtgggaacgccgaagtggaatgttctcgtagtgtcggtcgttccatccaagtattgacaaccagagtcgcagagatagatggcattaggatcgatgatagcacagcttcccttctctgggctatagtgaatgaccgcaccgttgggcccagtcgacgagatagtatcgaaggagagaccagcgaacagatcatgcttggagcgaatttcttccaacttgtcagctccgtcgacttcatccaagacagtcttcttgttgactagttcattttcaagccaagcaaagtactcggtcagggcagcaccatcgcggatatggcaagctcgcattccttcgagttcgacttcattcttcacagcctttgcatccgcgaccgggctacgggtctcttcgacctgtccctcgccaccaaggctgaggctgagagcccaagaagccttgttcgacaacaaaaacttggcggccttttcacccgcagacttgcctttggtgctgagggcttgagcatcagcaaagatggattcgtatggcttgacgataacgtcttgcccgaagtgagccttgacctctggcgtcaacttgtcatcctccacgtagatctcagcggtggtgggcgtaataacagcataagagaaaaacacggggttgtagggaatactgttcggagtcagtgaagtgccaagatgcattatagacactgttcttactcggttcccctcaggttgaatagccaggcaatctcatcgagcatagctgcaatgaattagtcactttgcaggactgggttatatgcgaggtggtcatacagatgatgaatccggccttcttctttgactcaagttccttccgcagctcggccaccttttcttggaacggcttgccggcatacttctcggggtgaacgcgcactttctcgctgggacgcgcggggcgttccttgccccaaatcacgtcgatcaagttctccctgacgcccacgagggatgaaccattctttttaagggtctctgccaacttccgtgcaccagctattgaagattagcgctatccacttccacgccgaagtaacagcactcacacgctgtgatcagagatggatcaacacccacagccttgcctccttgggcttcctccgtggtcctgccaacaaggtcagctcccatacagaccatgccgcataactgtcatctcgtaccattcctgccaagtgggcaccccctccactccacccttcaagagctgccagttgttgtccaattgtttcgcggcctggttgaagtaccgtccatcagtggacagtgcagctttgctcagggagatgattgcagtaccggcggagccagagaatcccgaaatgaactctgtgagaatgttagtgtcggcgcgaatcagcggaagaggggcgatcgttgacctcggcgcgcatcacatggcgcaatgtactcggactggtggctatcttctgagggtacaactatacgaagctggtaagcacaactcgagggtttgagaatagagatgatgtcatactgtaaacatcgaccttgtgctgttgcatcaactgccttagctttgacaggcgttcagaggtatctacgggccccatatcgactgtgtatcgcggaccgaaaacggagaagtgtcttggacgggagacgggccttagcgatcgcaaagatgtccgaaggcaaactggacgggagaggagcatggacactggcggacttcaagaggttactcatccacctgttagctttcgaaggctaagcgaagcagagattgaaggcgtcagataagtacacgataagctaattccgcaggtcgtgtggactccgtgtaagtggccttttaccggtggggagacttttggccgtagggcgatctccggagtcggctacacacggcccacttggtgttgtcatgtttgcactccaatatctacacaattgtatacaaccacattgctcgtttcaattttcttcttgttctttagaggttgatccagcttgagtgctatcgacaatggtgttatactaattcgttgtacgggctaagtcaagcttgataccttgagatatatgatgctagcaatatattccgcagtgagaaggtcagaatatatatcccacgtaggaaaaagcaaataaaggagttcaatacaggaataaagttcctataaatcgaccactccaagagtacagtatgtattataatgtatagtctgctaagacttctaagttctaacatctatagttaagcatatagaggtcacgtgcatacaaaccagatgagccccgcagttaccgctgaagcaaccgccttgatgctgattggccaagagatgcaaacactagattctgcccgtcatagctcccgtgctttgtatatgtacacttctctttttctttttcacaaccacgcgcttgctaaggaaaaatggcaacctgggtgtctgacgagggccttggggccagggagtcgatctcagaagcccatattgtatgcacaccatgtctacctttgaaactcaacagctaataaagaactagctggtcaccgagctctataacccagcgaaccaacgggaccccaccagaatcaatgagatccagacgcgcctccagcaacttcagaagatgaaagatgcatgggcaattgcggattcccttctgcaaagcgaacactctgcccagcatcgtttcatgggggctcttacattcacagtgaagatcaatgtctcatggtacggccaatctctctgatctactacctcgaccgcattcttatatgacgcataatttctgacttcggataccattaggaatgaaatcaaccaagactcggccgcagagatcatgcagcacctgatcaatcgctttgttacattggtaaataatggtgaacaagccatggttgtgagaaagcttgcctcaagcttggtcgccattttcagacaccctgccacaccgtggaaacaagccgtctggcagctggctgcaagccttgcccacggcgggtatgtatccgaagaacaatcgcaaggggtggattttcaggagcggatactgccagcgttgagcaagagtggatcgggtgcactcctatttttctctattgcgctcgctgaggaggctctccgactggactctgacccccaagatgggactggagatgcctcggctacccagcgagccatacacaacattaaggatgggttgctcctggttcaatttgtccttacgaagaccatacagcatgaaaatgcagctggaaatgatgcagttgatatcgcactagcggctgaagccatgaattcatggaaggtgagttaatattggtttcggtacttccatatcgaagagtgcaatcgctaattcgactcccaccttgcagacatggctaggtgttcatgggaatcgtcaacgctctttagctgaagatgtcaataccttggcagtacaatgtggccaaaccgtcattgagatattgagggtacccagcttgagtgaaagtgcagcttctattttgacccaagcctttgaaacccgccgttgggcctttgacgacaactcgttgtggcttatttctgatattcttgccaattcgatcgtgacagctcacattgctgctgtcgggagtggcgatgaaggagcagagagcatgtcgtttgttgacctcttgattgcatatgtctcccatttgaacttagatatattcagcgacccactgacccaacaaaatggagcgatcctcacacttatccacggaattttcaaaactcctggctatgcttccattgatgatctcggaaccccacgtgtcttggagtcttggaacgagatcgcagagagtctccctgatgaactcgaagaagacagccctaggtataacttggtaaagtcacacttagccgaagttgtcctaggtctttccagcaaactattatatcccaagacggaagatttggaagactggggcgaggaagagcggagtgaattcaatgccttccgtcatgaggcctgtgattacttgctctcagcataccccgtcctcggtgtcgacctggtcactgtctttcagagaagcgccacgtcctgcctggaaactcgggactggcgcaattttgagactgccatgttctgcatagctcagctctcagaagctgtggatgaaaatggccacgctgaccagtgtctcgatgccatctttggtagcgatgcatttgctaggctctgcgcaggcggggagactgaattaccactcaaggcccgccagaccctagtggattcattcggaaagtacgaatcatactttgagcgtcacagttcattacttccgggtgttctaaacattctgttcaaatcgctcaactttgagttgtgtgcgcacgcggcttcaaggtctatattgactctttcaaaatcgtgtgctcgcgtcttgacgtcagaccttcctgcattcttagatcaattggatcagttcagaagcaagccgacggcaactgtttccaccatgcctaaggtcttggaaggaatcgcgaccatcatccagagcttgcccagtgaccaggaaaaggtacaaacgctagagagaattctcggcttttttgtgcaggaagccaacacagcacgggaagaggttaccggacccgctcatgaatttggccgtctacgcggacacctcgtgctgagttgtattgctagcattggaaaaggccttcgctcagagagcgaagtcattgatatcgagcttatcaaggaaggaaacccatatcctccatctttctggaattccggaccaggcgccgaaacccagcgcctaataatggaggccatgagacttttgattgtcgacttccccgttgacagcagcataattgaagcagcttgcgacattttgaaagctggttacactgagcgggcagggctttttgtcttccccccctccatgacagtggactttatcaagagctttcccctcggtatttccgggacagatgtcatcatggcaaccgcgtcatcatttttggcatctcacgctcggcatgcgatgaatattcgcaccgaggccgaggcgctcatcgatcatgtagcccagctcttctcttcgatgctccagactccggatgtgtacgacccagagaccgctaatgccggtattgatttcctcacacgtcttttaccaaagtactatccgatattgttcaatcccgtgaagtcaaacctgagcgcagagtctcctcttgctgtgcttcttcacttcacacttcacgtattgacacggccagaaccacttcctcttaaatcttcttctgcattctgggttgcattaatagatctgcagggcatttccccagaagaaatgaacatactcgaatccgtctatcaagagtttattccacgcttgtgctacacaataatccaccagattgccggccaatgcgcaagatcagacttggtctctctaaacgacgctctgcgacgtactgtcttcaagcagatggcattggcgcgcccggctttgaaggctgcgctcgactctttgaacgcccaagttacagatgcaaccggacaacaagtgccgcttttatcggcgaaagacaagtcacggttcttggagtctctcgtcattgctagaggtggccacaaacagtctctggatctcgtgcgttccttatggttgaaatgccgtggcatggatttcgattatgcccagtaatggggcttgcgcattgatacatgacctgatgattggagttgatgggtcctgcaacttcggagtccatttagatatccatttgcatgacatacgcggtgcaacttgatttaatcctacttaagagtttccatttgcatttacctaagcgccataatgagaattttgaaatatcgagtagtttggccacttgcgtagaaaaagacatccgacccagtgggcaaaagtcccaaccaaagttttatgctgtacctggacaaacaatgtccaaagtcccaaggccgatattgctagattcagcgtcagatttgatctttgtgatatatactgcgtgttcttgtctggcaaatagatcgattttatacagatgccatatcatgtgaccacatacccacttaagttagttagccttgacccactaaccttatcctacaacacccgtcgacagactacatatttgtacagactactccgtacttcgtctgcaattccatcactttcttcggtattatccgaacggctaaaatatttgagtagcatgtgacaagactgtttgctcgaggggacatacttcaaatacctccaaaggattttcccgtgattccccgtcatcggagtgtacggcgtaacaaggagaatgacagccgaagctccgattggctgttttccctagccgcgggcaaaaaaaaagccaatcgtgtcttttgctatcggccccacacctccggacatcgtattcgtatactacagaaattgtctttgggtcctggatgattctattaattcttatgtattgccttatcatacattgaagttgttaacatgcaattattggttttaaaatgacaaatgtatcaaatcatatcatatatatgtcacgctagacgcctactcatggctcatgtacaagatttttttaggacacaatgatcaaggctgaaacaactgacagaaaagcacatctaccaaccacggccagccaacttagcagactcgggcaattgcttgacgttgataccaaccatcgcctcaccaagaccctcgctgacttgagcaagcatcttggggtccttgaagtgagtgacggcctggacaatagcgcgggcacgcttcttagcatcgccagacttaaagataccagagccaacaaagacaccatcgcagcccagctgcatcataagcgccgcatcggcaggggtggcaacaccaccagcagcgaagttaacaacaggcagacggccgagctccgcaacctggcgaacaagctcgtacggggcctcgatctcacgggcgaacgcgcgcagctcaggctcggggtcctggctggcgaggaggataccacgggcacggctgacctgcgcattgacagtgcgcatgtgcttaacggcctcgacgacatcaccggtgccagcctcgcccttagtgcggatcatagcggcaccttcggagatgcggcgtagggcctcgccaaggttgcggcaaccgcagacgaaggggaccttgtagccgtgcttggtgacgtggtagacatcgtcggcgggggtgaggacctcggattcatcaatgtagtcaacgccaatggcttcaaggatctgtaggccggttattgttagtgatattgtgacttttatttgcctcccccgccaccgggagatctccgtttcccccctccatctcccccgcatagaggtaattttttacgtacctggcattcaacaaagtgtccgatgcgggcctttgccatgacgggaatagtcacggcttccataatctccttaatcatgctggggtcggacatacgtgccacgccaccctcaacgcggatatcagcggggacacgctcgagagccatgacggcagcggcaccggcttcttcggcgatgcgagcctggtagaggtatctgttagttttttacacactgaatagtatcaattccttgtcagggagatcatacctgctcggcgttcacgacgtccatgataacgccacccttcaacatctgagcaagaccggccttgacagtgaagtcactgccggtggatccgtttggagcagccattttgaattgtgtagctaaaagaagggaatatgaacagaggtgaagagaatgaatagaagaagtgaattagaaagaatgaaaaagaagagaaggattccaaaagtgagtcagtaggaaatacacttttccctcgaaagttacttgcctcaggccaatcacatgcaaagtgcccctccgctggtccctggaaagtccacgactctccgtttcccgagggcatccccatccgatggcagaccgcctgctgtctagggccagtcaccttgttacatggatcttggctcttggcttgacatgcctaatgcagtattgcctgatgcagtatgtgaggtacctctctatcacttgcatggcagatgacagacagcaaactcggggagaggcaccgattccgacgttgactcatcactgatattccactttatcctattctggcaggagagttgcttgctccaagcataacactgtgccgccggtctgtatccatctataaaatatggtccctactatgtactccatacacactgtacacgtacgattcagggtccatcaatgatatgtactccactgctatccctattaatgccatttacgcattccaaatgtatctcccagcagtcgcaatacacacagcatcctaacaaccttggaactaacccaacaacatctaaagttaaagttaacaataaaataagaaaacaacgaccaaacttcccaaaaagagcctcaatctttcccgaggcgggcagatccccatgagctcatccatatatgacgtcacttggcatccccatccgccaagggaagctcaagctcatccccgaccacaaaccctccgagaccgactctccaactccctcaattgcaaaagagacaagcaaaacagacacaatgtccttcaagctattcactcaccaacccgccaccctcctccgcctggggctaggcgtcggcatcggtctctccgccgcgaccatgcatcccttgtcacctttccgctccaccccaatgcaatgccagtacaccactccccatcaatacagccccagcaaagagtcagagtgggctattaatccccccgaacctgggggtctgaagcaggctcgtccgcggcggaatgggctgttgaacgcggagactatgcgccaggttagtttggggagtgtgttggggcttgttgctggtgttgggttgagggcgttctcgaaggctttggttgttattttgggtatgggcgttgttcttatcgaggtatgtataagcttctgcctcggatttggggcttttctttgacttgctttggtgtttcgctggccgaggttatgggttatagttgtgacaagatgctgatgcttcttctcgatcttagtttgctgcggccaaagggtacaatattattccgatcaatcggattcagaaatatatcaaacgcgttgacttgggtcgcgtcatgactgagaaacggcctttcaagatgagtttcggtgctatgatggcgatggcggcgtttgcgaagttctagacttttcttgtttgaagatctaacgctacctgtacatacactcgaacgacgccaagttggacgccaattgacaaggacgcaaattggggctgttggatgcccgattagaattaataaaaagttcattcgtacaggggtatcatgagtcttgatctattccacaacaaatataagggaggatctacgctaccccagcaccagatcctccagcacgccctccatttcatcccgggacagtggcacacctagtatctccatgccgcttgcatccatgcgggaagtgatcatctggtggtcgtggaactcctttagcagggtacggaacatcatctccgaagaagcgacaaactcctccgttgccttctggtaaaggagacggaactcgatgccagtttcatcgccagccctgccgccaccctctgcaccttcatcgtctgactggtggccgtcgtccagtagagtgatgaattcggtcagtaggagacggtacaggttacgcgcattctcgggaagactcttgagcacaaagcccacgccatctttcccgccgacccggcggcccttgcgtccaaggagagtgttgacctcctcgacgacgtcagcctccgctgagaacggtaggaaggttgtacagtcatggaagacgaaattgagctgatcacgcagactgatatcccacatgaccgggaagttgggggtgtcggctgtagctaggagacggatgcgcggtgttgcagccaaacgggcgaggagtgcttggttggctgcgcggcggagaggcggggcatcaatagagttgatcaaaacggtgacgggctcttcgtgcgacttgagcgcagattgtagcagctcgaggacttcggtcggctgtgcaccaagcttggatggtgcatcgtcacccattacggctgtgacgatcgtggcgaagatggatcggatggagatgcctggtgtgtaaccattgaccatcacaatagttggagtcgtagtgtctgacaagcggtggttgtaaatccactccgcgaattcatccattagcttgcgcttggagccgtagccaaataggcagatgttgaacccttcatcgaactcgaatgcccactgcgggaaagatcggtgatgcaaggattgcaggtattccttttcttctttgcacggatccacatattgtccaagcttctcgaaatattcctcatgggttaacagcgttactttgttgagggtggcattcgatgtcttgacaggaccggcgcggttctgaaagaagtatcgttcgtgtgcaggcagctcgccttccggtgtcggggagcgcttattcctcgcaccttttggtcgtccagcacggcgctttggttgttttgctcccttttcaggggcctcttctccggctttaggttctatactctccgccagcgactgatccactttctccgtatcaggcccatctccatgtaagatttcctccgctagtcgttctgatccatcccaagctgcatcttcgtcctgctcgaatagcactcgtgcactcttcttgcgcgcagaccggtctgcattcttaactcgagatggggtcgccgcgattgcggacttggccttggtaggcgtagcgaacaagccacgagccttggatttttgggtgggcgttttcagcccggactgttgtaatggcgtcgcggagacaccgttggcctttttgggtgttgattggtcgagtcctgatgggggaagttcgtaggaggaatcatcgttcggaagtgcggcgttgggcgcgtggccgttcaaggcgccattggattgttctaaagctgtccgttttctctttggggtcgaaacaggcggctgatcgccggtgtctgagagcttacgcttcataacagtctagtcagattatagtcacgtagacgcgaaggagaaaggaagcaacagtaccatcagatccggagaatgtgcacagggtcgagacgcaaggggcttccaaggttggtaaattcaagctctcgtaattgcaaggagctgcaggtctgacacgggaatgtaggactaattgggggttgattgggtctcgaagtgcttgaaggaatgaaattggagcggatgggtttctccgactccgcgtctgaggtttggaggtatacggagtactgccttgaattcaacacaattcgcgagattttacctcgtttatcctcatgtgtgtcgtctgtggtgtttctagttatttgtacgaaaatccttgatttgtactccagagagctggctaaaaaggtcgcgcaagtcatgtgagcaaacgcactgatcagactaaagtccaattgcctagatgttcctcaaagtcctcaacaagaagaagaagcaaatcaccggatattatccccagatatctcaatagcagtgggctcataccgcgcaattagttgccgagtggggagccccgagaccggctactttttctcttggcttaagtttgactcacaagagcaccactcctcataaaagctggggtctacaagcctagcaattggcatagacaggacacatgcttccaactactcaatccgccactatggctacctccctcgcccgcatgctcaagggccaagtccgatgctactccgcaccgctggacatggctattccggcctctaaacagcgctacatccccacgaccggcacctaccccaagggcttccaggtgtctggcacctatgtgggcgtcaaggcctccaatacccgcttcccggatctggcactgatcgcctccgatacgccatgctcggccgccgcagtgttcacaaccaacaagttccaagctgcgccagtgcaagtcagcaggaaaaccctgcaaagccgcaaaggcagtggtatccgcgccgtggtgattaactcaggctgtgccaatgccgtcaccggcaaaggcggtctagaggacgcagtggagatgggaagaaaagtagatgagtgcagcggtgtcgagaatgacagctcgctggtgatgagcactggcgtgatcggacagcggtaaattcaccatcctattaggactgcacatataccgcaccccattgctaacgcaacaaaccactcaccagcctcccgatctccaagatcctcgaccgcattccaacagcgtactcaacgctcgcctccacacacgaagcctggctcacgacagcccgcgcaatctgcacaacagataccttccccaagctcctctcgcgcaccttcaccctcccctcctccccagaccgcacctactgcctcgcaggaatgaccaaaggcgccggcatgatccacccgaacatggcgacacttctcggcgtgctctgcacagacgcggccgtcgagccggcagcgctgcagtcgatcctgaaacacgccgtgtcgcgctccttcaactcgatctccatcgacggcgacacgagcacgaacgacacgatcgccgtgctggcgaacggcgctgcaggcggcgagactgtgcgcgcaccggcggcgtctcccagccccgactacaccgcgctgcagggcgttgtgactgatttcgcgcaggagctgtcgcagctggttgtgcgggacggcgagggcgctactaagttcgttactgtgcgcgtgcgcaactcgccggattacgagtctgcgcgacagattgcttcgacgattgcgcgctcgccgctggttaagaccgctctgtatggcaaggatgctaactggggccggattctgtgtgcggttggttatacgcagggtgtcgcggaggggactgttgttcctgagcgtacttctgttagcttccgtccggttgatgggagtgaggttttgaagctgttggtcaatggcgagcctgagactgttgacgagaagcgggctagtgctattcttcagaacgaggatcttgagatcgaggttgatcttggtggtggtgaacagggggctgctggatgtggtggtgaggatgctgtttattggttctgtgacttcagtcacgaatatgtgaccatcaacggtgattaccggacttaaaagagatgtattttagcattgccagtggatgttgcctaatcgaggaactcatttcggactcgaagcccttttggagcgaggatacctatagttacaaagaagagcggttcaacgaagcatgaatgtgaacaaggttgaggatcatggcaagttgaatatatgattttggtttttctagacacatatggttacaagaccctaagcagggcacttttcatcgctgagcaccacctatccagtaagattagacccatgtgatttcacacatggacgacctaagacattgacactgttgtctcgatgtgcagaggtccctagagaggggcctcggagcgttcatcggcaggctgatcaacctgcacgactgaatatcaatcaatcggtatagttccaattcagccagacagacggcgccaatccattcacccaaaaaagtatagcggacgaaaaaaaagacaaaaataaacagagatgttgcaaaggaccggcgtgatcctatgtcatgctgctcgtgaaaatacggacagtctctttagctgccggggacgaggcccttgaggccagcgccaatgtcaccctcacgggcggcaatttcgaagtagccgtaaatgatgctgtattgagctgttagctgaaatgaacacaattgatgtatcaacgaagtaacttacgtgacggcaagaagaataccagtaccgctgccgagggcacccatgaggtcagaggcgacggaaagaccaccaatgcaggcaccaccgaaggcagcggcagtagggataacgcgcttcagctccttgtacatgctctgctcgcggtgaccagacatgacgagaccctggtccttgagctgcttggcaacgtcccgaggagcggagccggaaacctcaatccaagtcttggagaatagggcgcaagccacaagcatgaaggtgatgtagacggcagtgtgaatggggtcgaggagagcctccttgaagttgagaggaggcgacatgtagtaagcaatacccgaggcggcgtaaagctgagcagatccctcacggggctcccaaactccgagaagctggaccaggatgttctccgagaagcgcgagtacagcatctgactgataaggaagatgttggagcacagagcggactggagcatgatgggcatgttggaggtgtagaagaggcggacggggtatgagccgcgcatgccacgctggcgggaagacttgacggggatctcaacacggaaaccctgcaggtagatgacagcggcgaagacgaggagagtagccaggaggttcatgacgttgggcaggttctggcggtagaacgcctcgtacagggcgcgctgcttatcgggccaggtcagaagaaggtggaacagagcaataatagcaccctcgaactcggggccacggccggtattgatggttgttggggagaaggccttccagacaatcgactcgcaaatgttggtggcaatgaacagggagataccgctgcctagaccgtagcccttctggagaagctcgtcaagcagaataacaacaagaccagcgacaaccagctggacaatcaggagaacacagataccggcaccgagatcactgggctggccgtatagaccagtcagaacgtaaacacaggcctgaccgaaggagagaatgatagcgaagagcttctgggcggtctggtagagctcgcggtcggtcttcaagtcgaggttgacatcaatgaggtgggtaccggcaaggagctggggcacaaaatatgtcagtacaatcaccgcgaagaataacataggagttttttggagtcgcatacctggaagaccatgccggaggagataataggggtgatacccagctccatcagagtaccccggttactggccagcatcatacggagccagtacagggggtccgaagtatcggaggagacaatgccgtaaagaggcatctgactcatgaccaagaagatcatcaaagtcaactataacgtaattcattaggacccaagtcgatttcgcgcggagagggcagattcagggcgacatacaccagtccacatcaacttttggttgaagggcaccttagtctcaggagctgccacctccgggaggaggggcgtaaagggcttgatcaagtcaaggaagcgtactatattcctccatcagcatttggccttcaattgagggcgattcgagacggattgtcgggattgcgcgacgaggtttcgggggactcacggccgctcatggtggctatcttcctcccagtccgttaaagaagtgaagaaagctggagtcgaaaaccagctaaaggaatgaaagtgaatattaagagaaataaaacaaaaggagaaagggtgaagttgtcgaaaggatggggggaggagggaagaagaggacagaagaggtccgctggccacttttcgcttccgcgctaattaaggccacttggtcttcgccgcaacaaccaacttggtgactcaaccaaaaaaaggaacggggtgatttggagagaattgcactactttgagcttcaattcaattctcaatgcatttctcttctgctagtctttcaagtccgatgtgttgtgcaccccccaaaacagggctccaagctatccccacactccacagaggccacggtactaactacgcgatcgggacagctgggggtctacaccctatggtgcaagatatgggggtaattattgggaatcataatagcatacatgtccaaatacatattccgactgctttcatcctataaacatgtaccatcattctataaagagtataatattgccatctttcaaggcccaacaagacccaggcaatcatcaatgatcacctcgagctctcccagtcgattctttaagccgcggttctcctcttgcagaacacccatcacgctccaggcctcggaagcgggcacgccatagcagttggtgcaattaggcgcgttactgttaccaccagcgaaggagctacctaaacgcgttgaggcaagacccttcaagacccgatcatatgccgagcgtacaggtggtggtgtactcgtggccgcgactaggttcttctgtgctggtgtcgggaccgtcggcgtagacagggcgatctgcgacatgttgggagacggcgctgtcagagcggaggtcggagattcgacaccctcacgcagcgagaagatgctttcggcgatgctctcgtcaccggactcgaagcccgagtcgctggtgaaggtgctatggctagcacgcttgcctccacgccggggagtttggagcgccatggaagctgcgtcgtcatccggatacacagtacgaattgcacgactgcgatggcgcgattcctcggtctttcgcatttctctctcctcctctagttcctcggccatggccttcatagctttctcctgatcgagcaccttggcggccatgccgtccagctgcatcttgaggtggtcaactctggcgcgagtctcttctagctcctcctgcttttcgttcttgtctgccaaagcctggtgcatggcaaaggtgcgttgcttataggcctcctgcatacgtcgtagcactttgtccgcatgatctcgtagggaatccagtgcctcatcgttggtatcatccgtttcgggtagtctgagagcggcagtgatgtccaagttcaaaaactcatcatctgctggctctgggaaattgggtttgctcggttgtcgccgcaggccgaagaatgaaaaccgattcgtcgaggtcgagttctgcctcatatgtgacatggatgcagctgggcgggaatccaatccggtcccatctgaagcacctggacccatattaagccccaactcgactggatctgatttcccctggaaccaatctgacaagaccctggctcttgcttcaagcttcttcttcggaaaggtttcggaccaaggggtattctttgggtttgatatcgtgccgtcgatgccctgttcgaacagtggaggccttgcgatatattcggtgtttgctcgacgatgcgaaggcggattgttcaactgatttcgtgcggttctagggaccgacgatcttgggagcgtcaaggcaacggtctcgtgggggtgcgtgccatcggaatgcagggtgacaggcgcatgagtaagatcgggagacatgttctgaggggtaatttcgacagatacacggacaggactgaaatgccacgtcgattcaggcccaatgtggcgttggtgtgcgacctaggggggaggggtttgcggtaggggtatcaatgctgatcaaggacaaaacagacccctggaatatattcaaggtcaaacgaaaaagggtataggtggtttcaatgaagctttcatgtttcacagggttgagtgtggatttgtctagtgaaaccgagaagacgcctcaagagtaggaaacaagaagacaagaggctgggacgatgaaatagcggtggctggtctggagctctctccaccttcgtgatccaccacgtcttcctttccaatctgattaatcagagcaatgagggttgccttccactagacttatttcgagctcgatcccgtcatctatttttgccgctcccgctgtgcatgctttcagctgcacgaggacctgcgtcattgcacgtttctgcaaaatcctagcgtcatggctcccaacagtttgaagcatttatctaacgccctggcgacgcccgatcaactgtctaactcttcgtcctcgatcgacaatgtcccatctgacctcgaaacctctattcggtgcgcgggcgcccagctaactcaagccgctggggtgctcctacacctgtcgcaagatataattgcccaggcggtcgtgatcttcacgcgtttttggcttggcgctgatgggggtagcttgcgaatctactcagtcaaggtaggaccaactcgaggaatcctagccaattcagatccactgaccggagcaggatgtgtccgccgcagccttgtacctgacggctaagctttccttccaaccaacatcgccacgctccgtcctcaacgtctacacattcctcctatcccaagacgcgtcacccttgtggtttgtgaaacagggcggagctccggagacccctccatcccccgaaacctatatcctgtccgagggaggctaccagtccgcgcggctagtcctcctccgcaccgaaacgagtatcctccgtactctcggctttgatacacatgttgctctaccacacaccatcgctttgacctatcttcaaactttgggtgtggtaaagcccgctgtggctcgacgggtcatccagcaccttaatgcggcgttgctctcgccccagcttctttatgtcacccaccaaccaaatgccctggctgtggctgctatctaccttgcttcgcgggaggaggaggtcaagcttgtggacggcgagtggtgggaagtctttgatgtcgatcgcgaagagctcggctttttggttgtaggtatgaagagtacagaaggtttcatgcgagcggaggtcattcggtggaagaacaaagctattccaatggtagtagatggagtggatgtcgaaattgagcgacgccgaatgatggaggagggtgaatgaagcgctttgattttgctttgattttgccgagaacatatattccaagatcaaaagtctactgggaaggatgttctagtagaagctagcaagctatctactagaacattcaccaaggatggcaggcattctacatatcggcagaaggcctcacagtcaaaatgcttgcgatatcctgctccgcgccaagaaggaattcaagcaacgacacccaacactaaaccgccttgtctctgtggtggccaaacaggcggttggaaagttagctgcttccacggcttagtcgattgccagggagctctgcgactgtcaagctgaacctatatgttatatatatcttctcttgtggccgtaacaatcaaagtagatgtatgaataatatttcagaactcagctgacaagatagctagataaattgctgatcataactgaatgatatagatgcttccattctactccatctgctctgctcgagaaacaccgtcaacagcttattgatgttgtcctccaatcggcgctccacattcaggacatttccatatccattgaaaacgtcaattgagctaccctagccccggtcctgttattctgttcgggtacaggtactatggctagaacaagactgcggtgtgcacttgcgactacattgcgaatgacttctattctgttttcaagcgcctcgaggtcggccttggagcatatttcggtcattttgtggactaattcgtccaatgacccgagaagtgaagggaggtcatcatggaagtgtgcccgtcggaccctgcgtagaagctgatacagggcattcaacagcaacttcaccatttctggagtgacaagagtccaatcattgtcatttcgctcacagctgtttatcatgaaacgacaaacgctttccaaaaacccgattgctcgatctcaactcgggccgccgaaggttgcgtacatggtgccaacaaatgaatcaacggagagacaatccaagagggaaggatgggtaatggctttgagaaatggctcaacgtagacaggaatacggcgactccaatcttggccggtggtatcaatagtttccaggaagaacccgtgtccatcaagggcatcatccacgaggtatttgacaaggagctgctggtcccctgtgtttccactatcaagtatctcaaccgctccttcccacagtcgaaggatctcttcttgtcctccccgggatctgacaccgatggaattcgttctcaggatctttttccagtcaatgtatcgtttccgggtgctcgaatcatcagtcgtaggattaggttcagatccgctagctcttgtcaggtcgtgagagaacttgcaggtagagccgtaagtgcaatttccacgctagaatttccggcagagtttgtcgctttgatgacgggtcccgaagttattcgacccgcctcgcttgctggtatggccttcgcctcggaatcgccagtttccaccgtcagccatgatcgtaaaggaggtaatctgagtaagtagggaaaaagatggcagtaattttctagagaagtaagttgctggcacctaattatatggtacgggttatagctaatagcctgtatttgcgaagagcaaacgccgatatgcatcgtccctagaatcatgtatcttgtttccgaatggcgaagcaatcacgctcgttcccggtcttaacctcatgtatacagacaaggtactgattcttgcaccgctatctaggcgatctatcctcatgtccatacaatgtccgcatcgtggccctttaatccacgagacctgcctcaatctcgctaccaactccctcttaatctcgtgcttacattcaccctcttctacatttccgagacctgtggaaaggagaaaggtacattctgcaacccctattctagcgtagaccgaattttccatggaaggtttgctaggtcaagtgactagaaacggaaatgaatcagaagatatatatactctgtatcgctcgtcacgttaacagggcctccggaaagtgacagttttacataagcagatatcatcacgtgccaccatatcggttcagaatgacgctcacgcggggcggatcatgtgctccaccgcttatcatttacccccgccgcttcttctgtaactcttccttcaccttcacctgtaaaacacaatgaatatcctgcactccacattgtcaacttggcgggaccgcctggccccggtatcacgcacttctaccttccgtaataccggccaaatcactcccgaggagtttgttctcgccggagattatctagtctacaagttccccacatggtcatgggccgacgcatcgagtccggcaaaacgagtctcctacctcccagatggcaagcagtttctggttactcgtggagtaccatgtcatcggagactgaacgacaactttgccggggatgcaggactcgaggatgagattgtgagggatttcctatctggcggtgacggcgaaggcacaccggatgatggaggggatggatggttgcggactggcggtggccgtgatgctggggcagaccatgataagcaagaagctcggatccgtgacgtgcgaaccgttgatgaatccgggaatctgggcgagcaggaggaggaggatgatatccccgatatggaggatgaagacgatgatgatgaagccattatccgagagaccgataatcattcagggacacagtgagtgctattttcctatcttcaacatcacctttctcttttctaaccgtgacttgttatcgttccagatctctccgcacctacaccctttacattacatactccaacttttaccgcacaccccgcctttacctgtccggctacttgtcgccatccgaaccgcttccgccacatttgatgatggaggatattgtcggcgactacaaagacaagaccgtgacgctagaggacttcccatggttcgagggcagtgtcaagatggccagtgtgcacccatgccgccatgcctctgtgatgaagacactcttggatcgtgccgatgccgcactcaagcttcgccgtgacaagctcaaacagacgcagtcgcgcgaggaagcgaaccgcgttcttcgggcaggcggcgggctggagggcttggtggatgagaccaacaacctgtcgctcggggactccaacaacggacatcctggcggggatgagtgggagatgctgcaacacgacgaggaagaacaggtcgcgatccgggtagaccagtacctggttgtgttcctcaagttcattgccagtgtgacgccgggcattgagcacgactttacgatgggagtataatttctttgaattgatcaagactcgtcctatccgatctttctatattcctgagctaattggattggataatggctgggatctggcaacctgtcccctttcgaaatctgatatgcatgaccttacatgagttcggcgttaatctgcttctaggcgcatggttaatatcctttccccttccttgggttgcttttgctgtatattatgttcggtagcttgggatggggttcccattgcaattttactacaatttgtgagaataccagagtagacacatcttattgaggtcatatcatagtcactagcattcgaagtaagaccacggggtaccgagaactgagctcgggatgaacaaggagatccatgcattatatcctactcatagatgtatgtaatgcgactatactcaaatttgggcatatttccagctctttgcaattccatcaaatcaaaatcacaacaatcatgacctggcttgtcgactgctttatatataaaaggaatgatgtatccaggcactgactgacgtacagagaggcaagagcgaccttgagggtcagtggcccatttgggaaggtacgtgttcctgggggtataaaagggcccctccccccatttttcctcttctcttcttctcctctccccatccctctgaccatcatctctccgtagcccccatgagacagcgtaggcagagggtgccgtagcacatgctgcttgacctaccacagggatcataacattaccttgtttgttatgaggtccatgtaggtctgcatcagatatcaaaccgggcgttctcgtggatgttcctgaagtcgtggctctcattgccatttgacaagtcccacagaatacatgaggggtgtaaatcttcgtagccgaggacgcgaaggtagtcaccactgcttcacctaccacagggatcataacattaccttgtttgttatgaggtccatgtaggtctgcaccaaacaacaaaccgggctttctcgtggatgttcctgaagtcgtggctcttattgccatttgacgagtcccacggaatacatgaggggtgtaaatctccgtagccgaggacgcgtgggttcgagtcatcgtacactagtcacctaggtacaaggcaaagaattaccttatcggtgttcacattgctaagacctagatagactgcctagagcatctcgtgcgttgaaaatgatgcctggctatccgactgctcgtttttcgcccacagctatcacaacccatttttggattagggtatcccgagctggaatcactgtgaagcattcatgtgtatacgaatcgaaggacacattcatagggaaagtccaataagattgctcatgcgaatggatgctggtagatgtgaaatatataatgcagaggtaaaaccagggttgaatctgtcaggttctgcatgagtcgttttatgtgagttatgagatatatatcttacagatttgaacctcggatatcatatgctgttcactccacttgtacggaaaccgtgcgaagtctcgagcttcctaatgcagtttatattatagcttactctctggtctttgctaccaggctttccaagtggtctgtttattcaggatcataagatctcgggacactcactacactaggtgatcttctgagcatatattcaggcgaaattagagaatccaaaatctaccaggatgtgaaaagcggcggtgtatcatcagagtaatatattctaggtgataataacgatatcaaaagccgcattaacaagagacagcgaaccataagaaccccgaatagtgcaaagcacacccagacgcccaagtgaacaaccatcagcagcagtaataaacaagatcagaaaagagtaagtaataaaaatcggccctcacaaacgagcacagaagatacaaataatccgtgggtgagtacaccagccgacgaagacaaattataaaaagaaaaggaaaacaggaagaatacagtcgtgaaaaacaagagatgcatgcaaaggtccgatcaatcattagatagacctaccacatcgttaacagatggatgggtggtttctatcctggtcatttccgccattttttatcgtgtacgtctgatacaagcaggggcttagttgaagaaagccaggataatggggagagccagtgcgaggacggatccggggaccagagatgagccggcgttgaagacgggcgcaacgggtgcggagggaacggcggaaggtgaggccgatgcggtgggtgcagcagggtgaatcagagggatggagacggagggggcccaagtagccggggcggtagtgagaggagcgtagatgggggtagtgaaggtgggagggaggatggtggggacgtcagaccaggtaggagggttggtctgagcagggggagtgacagtctcggtgggagtagtggtagtggtggtgggcacgacaacagcaggggtggtccaagtggtggtgggcacaacgacaacggcgggaggggtggtagtggttgtgggaacaacgacgatggcaggagcagtagtagtagggacgacgacaacgggaggctcagggcaagggtagccgccctggtggtcgtgaacgccattgccgacgttgacgctaggaccgccggggataccgacattgacaccggcgccggcgctgtagtcatcacctgagccagggccgcaggggccgcggtggatgtcctggaatccggcaccggcgttcacagagggaccgccgggggtgccaactttgacgccgctgccagctgaagtctcgctgttgtctgggccctggtgggtggtctcagggccgtggttgacgatctccgggaatggggcagctccgagagcgggcagctggggagcagagaggacggtggcagggccgagagcaaggacgaggcacacgaggccggagaagttgatagtagcggagaccattgttgcggtatgattctttttgttgttgttttggaagaggaaagtggttgattaaaggcgagaactgaaagttgatgaaagagagttgcgaaagagagatgagggaatgactgtttagaaactgtgatgcttgatgaagaacagaagaggaggcgtgaacaatgatccttatgtacttttcgacatccatataaagtgtacactcgaacagtatggtaaggagagccaaggctatccaggaccagggagatcgctgcaaggtacgaacttccttggccttaatcttagaaaagccacaaggtcggtgatctgcaaggcacaaagtcaacggaagctaccaagacaagagatcgtgagagacatcatgtctcaaaggatctgaaacaagtaattagcggaaattagggcatccgagcaacatggttcgatagtaaggagctgcagctctgttgagagactagatgtgcctgagcgagcagcgcaaagcttatgcacgagctctaactcgagcctctgagctattttagctcagctaggacagacagtattggcgggatcctgtatgggatgtagatgggctgctatgggagtacgaaaacacgtgccgaatggggaagaaaggttgtatggatgcaagggataatagccaataaggcacagagacactaagatccctctctgctagagactttccaaggagccaatcaggacattggattaagattgagtgcaaaaataacacgcaaggcactccaacacaggtgagttcaaatgcaacttgctagggctgttgcctgttgcctgtcaagtcaggtaaccccagaaacgaagactgaaagaaatccgaaataattgaaacaaatggggttgtattgcacatatcggcatagatcataagctcgtaaggtatttcgccagaagggagaaagaagctaagaaaagcacagcatcaaaaggatgctgctgagaagtatagaaaacatgaagaaatgcaaaatagacatagtaggagttcacacatagaacacaaagatccaagcatagatgggaaatatgtgcgtccttagacttgacccgggttcgatatcccgaatgcagtgccgaaattagttgattgcttgaacctgatttcaggctgttggtcttggtcagggaactcagattcagaatcagactcattaggatcagccgactcaaccgagcttcccaggatattttttgcttcaactaggagtttctgattcagttgatctaaaaacatggagtcatgctcctcatcattaatcaaaccgagaggccccttcaaaccggggtcatctggcacatccggaaagtaggagaccttattttcggagggttgatgaacttccgttgtcacgggcgcaagaggggcgtcctcaagctcgggggcaacctcgaggggagaccccggctgggtggaccgactatcatcggcgtcgatgatcgccatcggggtgtgacctgcatggcggagcaagttctcattgggcgggccaagctctgacagcttcagtctgagactagctcgatgttccataggaggccttgcagcggcggtagggggaattccaggggaggttcccaggggcgatggggagggcggggtgatcactcgagctactacggcaggtggcagcgccgtggacttgagcgtgatgccgtccaaggttctgtcaagcttttcgatcggcaccggcagactcacagtcggtccagaagcgtctactggtcgcgaccggggcgagagggcccgatcaagggatggtggatccccactttcggatgttggcgatagatagctttggtctggcgattcatgatcgaagaacacccttgttggccgcgtgcctggacttgatccctcccacacctgcgctgcgaagccacttgtgttgaactgcggtattccacccgcaagcacatgtttgacggcttccgatcccaattggtttgttctgttcccgtgactcttcacgaacacctccagctcggcgatttttgatcgcagcagcgcgcgctctttctcccacaaccgtcgttcctgtgcgaacaattctctctccgtctcgaaattcacccgttggctgtgaagaagcgatcgcgattggtcgatataggacgtctccatagcgaacgaattcaccaacaccgagtcttgcaatgcggtttggccgtagcctgaagggacatgaggaaacgtggctgaaacggattttgtgcgacgtagtggttcggtcggagagaagcgcacttctttgtagagactcccatggccgtctagtagtttggtggacttcatgtctgaaatgtgggtttctctcggtgggcgcaaatccgcagataagggctctattagggataaacacgctagtagcgtgggatagtccagtgcccaacctgcagagcttcggctttccacgtcgagaccagtcgagttcctaaaagcggtcaatgagttcacgctccatctaatgggatttcatgcgaggttcccgatatggcacatgtcaagcctgcggtgaatggacactggttgggcaggtttgggatttgggtagcttttaggtatgaaggccccatatgagagggggagatgttagactagatcgtgaatatccacacagattctggggaaatgcagttacaggaaaggggcaaaagggaaacacctggccaagttccaaaaagcaatgtgaatggatgcatctgatcacattttatgacgtcaaaggggctggaataggcaatgtcattaataagatgatgtcgggtgagtcagaagatgatacattaagttgagagtatatcagagccatctatgtaagtgatatataacaggacaaccgggcaacaaacataatagatccgtctataagctgccatggaccaaattagtataaagaagaatgaaagaagaaaggagagtgtcgaaagcccgcccaacgccgtttgcgccaaagatgtgccacattagccattataatcagcgctcagacgtcatgacgcaggctaaaagatgcaaaaacaaaaggatatcaaaagacacaagttgtaaaaggagagggaaatccctcagagaacagacgaggtgggccgcagccggcttggcgccatttgcttcttgaaatccaaagaccaagcagaacaccccttaatagaccgatccgactgtctcatcggcgaccgactgcgccaaacaaactgctgcgcctcgtccagcagatgctgatcgccagtcggcagcggatagaagctgacatctttgcacaaagcgccaaagcgcgtcgcaaggtcaaacaccccccgggccgtgagatcccgaccacccacgttcgcagacggataatagtagcgtggatcgagataaagcagcacgctattccacatcggaagcttctcggacagaagccgtcccgcggcctcgtattgttttagcgtgcgcttcggcacgccggtctgcgtgtgcacgaagaagaagatctcgaagccgacgctgcggatgcgggcgcgggcggttgcgctgagcgtgtccaggaactctgctaatcggtcgagattgaaggagttgcggaggaagagcgtgtgtgttgagtagaggtagtcttcggcttcgtcgtggagctggcggttcaccgctaatagcttgcgcgcggtgccgtcttcgccaacccagtgaggactcattgagattgcgcggtattggccgcgagctgtgaaggtgttgccgtgatcggcgagcacgatcattggtttgctgactaggtaatcattgggtacatctagtgcatattcgtagatcttgagccggagttcggctgggagttggaggagccgcgatggtgatgtcgatgttggagtcggagttggcctcatagctgcttagctagaagaaagaatgaatgtcgagcttcttgcgaaatgcggctgttgatccgatttaaaaggcagtggtaccactcgggtgtatacgtcgccaccgcgagaaatttttcgattcgtcggaaaaagtcaatgcggaataaaaatagaggtctgtactttggacacagtactcctagatggccttgcatcccgagaatgcaaagaatcagaccatgccgacctatgatacgaggtgccgagtatctgatcggcatctcgatgcctatagatatcgcagccaccacgtatacttcaccgcatgttacatcccgatcaagctacggagtacagcaatgagcttactaggatactctaggcgacttttcctgggtatgctttaccggattttgatatgataaccttggaactttggttgtatgagtcaaccaatgttgtccttagtgacggttttaggatccgatgttcggagtataaaacagtcatctgcctttcttacattccttcttgctttagacctgtgactagctctattcgatatgaggcaaggagaaacaacgccaagcaacgttgaggattttcccaacacacgtgcaatcgatttgctctaggcctcagtcctcctaggtatgtaagaagtagattgccatggacccatctctgcaacatgcaagtatgggtcgagtataggaaaagatgatgcaaagctatcattcattgtgccattctctaaaagtaattctctttgctctatattgtagcgaatgttcgtaccttccgaagctatacatatatacttcgtacagatgtcaccgcctagtgatatctggcgaatcttcccccaaggcttcatcgtctgtttcaaggctatgaagcacattaatagtcattctacaaccataaactttaaattagttaatgccggcgtccaagtctcattgccgactggatcgaaaacatatccgcaaggggccaatttaacggtatcagcagccatccaatcctaccagtcagttctactgccccttttctgtagcagactttgctagcgatggaaagagaaacagcatagctaacctgatacggaaagatggtgcgagcccaggcctatcaggctctttgggcaggaaaaaatgcccagcctatgtatgtaacccaagaactatagttaccagtagtcgattggatcatccacggccaagtaaaagccgagtctccaatctccaaaaattcaagatgcaatctatttgctatggaaaactgtccgaaaataggaataatgaagttcccggatcatcgctgtctatacacacccagcgaccaagctgcccgcagaacagccagaccccaagccatgccgatactatctcgtaagacattcaatttgctacccttcacctccctccacccgacaggaacctcagccacagggatccgagcgaactcagccagcatgagcatctcaacatcaaagatccagccttcggaatgcatatacggcacgatgtaaggtagggcactgcgggagaacaacttgaacccgcactgtgtatccttgacagtagccgttttaggaggcgtcataagccacaggatcaaatggaacgaatgcatcaggaagtttcgaagcttggatcgctatcgagcagtcagtaatcaatcgcaagcctcccacaacccacaacccagatatcaaatccccataccttaaccacagcctcactcccaaccatatgcgcccgcgacccaacagcaaccgcgcgtcccttcgcatcctccacatcccgacaagccccaaccagcttccccagatccccgaacttgctcgctccatccgcatccgcaaagacaacatactgcccccggacatggcgcatgccgtgcgtgaccgcgccgcccttgccacggttatgcgtcaaggtcacgacgcggatcgtgccagacgggatatgaacgccctctgcagcctgcggcgtccacggacccgcgtgtcccttggggtggagagagagctggtggtcgcgcgcgaagcggaatgccacttcctccgtgcggtctgtggacccgtccgagacgaggatgatctcccagccgcggtctgaggccgagcccgcgtcgctggtggtatccgcgttcggcttgcgtttgcgcattgagcgcgtctccattgtaactgggctgctggccctggcgagggcgctggccgtgtccccgtacatctgctccaggtagttcacggcttcctccagcattccggtcaatcggtcttcctcgttgtaggctgggactacgacggacatgaatagctcggccggtgcgattgtgtggggtgtgctctttttggtgtggctttcgagccagcagggtaggggttcggggtctgtcacggatccatctttggcgagggttctatactttttttcttctgggagaggttttcgagggactggcgcaacgaaaaatataaatagtgagaactatgcgatagcaagctggtcagtaactttcaattgggctgcgcgtgtctggagtgcctccgcgcgatctggtacaagcggagttgggtaaacgtggactcaccaggacaaatagtcctagcaaagtaactagggcagcgacgagtaagatctggactgggatttccaccgcagtattgacgcattggcgacagacctcgccccaagctgccgccattgtagagagtgacgaattggacgtcagatgcggagacggaagaggtgcggatagggagggtgagtgatgcccgaagggagaaggcaagcacttaggtcggagagagaaagtgtttattcatagaggtaaagcagaatgatcctcgccatttgaaaagagagagggcgcagaagggaggggaggaatgttgtaagtcgatagtcgccagcttgtccttttatcagcagctcaacgcgcaagccaatagatccacatctaggagccacgctgcgtagacgctctatttttacagtgttttacttattatagcttctattataatctatttttcatattctgttacggttcgcgtatattgtagcgcatttacctctttatacgcgtttaccgcgaatcgcatggaccggccagcttgtagaatggacattggctcataagagctgcttcctgctctatcacattgctcttttcttctaatatgcgcctcgtgatgttctccaatgggcaaagctagaggactgtctgtagcaaaagaaattgacccggagagaacatgatcatggtgcccgaacactctccggccatgcctatacaccctccataaaacagcgtgagtaatgagacaggggagaaggacaaggggattgacactgaaagcttccaattttaattcaaatacttttgttctctcatctcatttttccttcttcctctcactttgcctccctagtctttgcgggagtactctttgattctcgcaacaatcgttcgcccaactggcaagtttgaaacaacgcatcgagaagccagggatgacttcttgctaatagctctgaatgtgctccttctggatagaagaagtccgcagtaacccgagtccagaagggatcgaagcaggcctcttggcttctaacaagaccaatccaactgcggtggaaacagactagaaatgctggccagagttggcgaatagtatggaatcagacggacggaagagcattccggggcagggatcctttccataaatatggcaatatatgcgacaatccttggacggtccagtcattgcagagaggttcgtatggatgcaggccttccaggacagaaagacccgagttctgatatctgtcgtgaatgtggtctggcgactcatgaatttcctgtctggtaataacgcaagataatggtccctatctggcttcgtgtacggaaaggacagagcgaacgatctggaggcttgagcactccatttcgaacaagaaaaaaaaagaaactctcaggtttgaccagcgcggacccgtcaagacgcgcagccaacgtcgtaacggaacccgcagcagtcacccagccgcattttcaaacatcctgcatttcttgattggaagaggatagctcaatatctagtgagttaggattgccatagagggaagccggtgattctgccattgacgcaaattcctctgctaatcgggtaggtgtgaactgtcgcgtctgatcgtatgtcatccagcgggtgaactagtatgatggtcagtttaactgtgctgataggaacaagggagacaaacagttgcgatccgcactccaagccaaagacatcggtgttttctgggaatgactgctgaaggttcttctgttgatggtctgttatcttctgtaagagccccctcgaagaacccttctgggtagtaaagccggctccatgcctgtcctctgatcaaaaagtcctccggtaactgttgtgtagttgagtcgttaagaagcgggaatgattcgtcttcgatcttcgaaattatcgtgtcgggatcgaacaaggtgttcagataagttgctagtaacgaccacggaaccagcggttctagtcgttgtatagccgctgggttgagtgtaagagaccacacaaatgccatagagatatgcacactcgggtagatgttgggatcaccgacttgcccgagcatcacaattaacgtgtgaaatgcgagagagctcgcccggaatgcaagctgagacgacaggtcgctatatgtgtcgggaacgggtgtgttcgtacccgatgcccacttcattgccgttaggcgttcttctgctgtaggattgcgcgacttcaatgtgaaaaatttttccatcactccatctttactcccatattgaagtattgcgcagatattgcaagacgtgagtaggacacctttctgcccgcgcacccggttaatttccttgcgtagaatagtaagaaaaaccttctcccgagaaacgaattcctcaaccggagcttgcatgaaaagcgtaccgtgagtagtcacgaacgaggtaatcaaatcccctttttgagctggcatattcataagaggagtgaccagctgaatcatgctatcgagagcatttgggaatgcgcgcacgctgatcaatgctttcgtgtagtggaaaaactgctggagaatatccgggcaagctaaaacagcaagatgatgctggatgcggccattctctgcgcttcgatctgcgtcctggttataccaatacctcgagacccctacccagagttcgcggaccttcttatcgaattcctccacggccatacggtaccgtgctaagtcacctaggcactcaatccaagtctttttaaaatctggcacgctttccagtagcaatgttattatcgagtacgagaggtaaatgaagtcgagcataaactccatcgaatcggggagtttctggcgtagcagctctagaaatgaatgcacgccatagcgccacatgcgcgccggcatcgcgtacttctcagctagctctttaagaacaggaccagcagacgggtgccgggaggcgaggaaaaagtcatgatgttcgtagagtagtgttcggtgtagcgagaccagtgcctgccactgagccagcgatagttcggcctttgattgcgccagttgtctgtcgatttcgatgcacttcttttccacattgacaacgccggtataaatcccccgcacttcgttaatcagttgctcctcggtgatggtgtgcgtctccagctgccgaaacattccatgcggttttgcttcctgactgactgcctctgccatcttcacattttgattcattatttcgtcatttttcgtgtaccatgacttctgcgcctgcgcttgattttgcatggtctgggaaggattcttgatttcaacggcattttgactgcgcacagcaacgggtgttgaatgtgatctctgcaaatctggacgtgtcgcaaagccttcccgcgcactgatcttgatttttggatctgcggggtcatttataccgtgtggcacgccggcctttagctgctgagaagccagtcttcgagatgaacttatcgcaaagccttgagataactgcgatttctcttcttgcctgggcacacggatctcaatttttgaatctgcggggttttcatttatgaagtgaggcacgccggccttaagccgctgagaagccgatcccgataaccgccgagactctctagagaccagggagctgccccgacgacgagatttgccgacatgccctgcacaggggcaaacggggctcctgagagctcgcatgtcgtgactactacgtgttatcacagtgcaatcgtctcctaggacgccagtcgactttggtcgagcactggatatcggcgagctggccgagcagcagccatgagtacacatcgattcagagatcaaatcttccgacaatagtcttttcttagatcgcctgtataaacggttaaggataagcaacaaaggctggggtcgcaacatgcctacctaggtgacacgtcgctacggacaactctatctgagagtcttgtcttagcatccagctggctgtaaaaattgcgtctggttagtcttgcctccttacggcacagcttgtcgcccattttcacttaaggagaattagttgatcgtttgagccttgcgagtgggcaacgtacctgataagaagaagagatatcccaaatctcacatgttgtcttggagaccgggcgaatatatagaagaggcggagatatagaagagggttaaatagtctgtttgggttaaatcgaaatgtagtggcgtagtgggcgcctgggtgtgtgtcggcctgcgtgccgatcatcatacgcctatcattctcgtattttaccatacccaggtacgaactatcggttgcctaacgaattcattgcttctatccctttagtccgatctccatgctactgtatacccgcttctcgccaagcaacctaatccccgaatcccctgaaggagttagcctctcccctgccatgtcactgccttaatcgcgttaggggaagcagacaggtcatagccgccccaagcatcccagatctataacttcctctctttttatgtacgaatcaaatatcattgatctgcaagagcttacgaaatatatcttattcgaaacatttgactgcaatcaacagagttcaggtctacccgtaattgcccaacttgtctcccaatatgtcagatacggcatcttacgatttgggaaaccttcgcgcctgggagtgaacacggggtgcccttacagcgctaggacattgtctgctcggtcaccgctatttggctgaatttgaacacaccggttcttgaccaagcttgagcatagaccagggccttcagcccaagagcctttgtttagccttggtttaccctgggcactgggatgaccccggtcctttcgcattgagcactatagattacgttcctctttctcctagaatgaggcaattcttgcaccgggtcttttaagttattagtgtttagggctcatgtcacgctcttattaccggccttcgtattaatcattaatcatcaggtcgagattccttaaatatccggtgactggcaatcatgcaaccgctcacggaagccgacagaatatcggaccacacagccttgaattgttaaaacgcctaggtgatggctatacttagacggggttgaagctatggacaggggttatactgctacctaatccctatttatctccatcgatacggatacctaaccaggtcaagatacatagttcttagcctagaaacggctttatcactcacatccaacgtacactagctaccgggcctaatacaaatgtggataaaccgggcgtaaacactccgaaggctacaaaatactcaacgtcatccacctgtcattcaaatctctctacaactgtactttgaacctatcaacaccaaaacaagtggcttaggatgacgttagtccatttctgcgtttcaaaaatcttaggcagagctgcctaagcctatcgcgtaagcgcccgtaccgattggagggtgtttaaggtacctgtacctacttcgtatgaaaaacagcatgacctgcatatgtaggatgtaggatgtagtcagtttcaattctattaactcccatgcaagagatacctattccaatataatcaatcaacatgttgtccaatcccgtgccacccaataccaacccgggtcgcattttacagcgaggcaacttccgcgatccactaacccccgaacaaagggatcccgctcgttaattctacctcccttcgaggaaatcaacttcaacggaaccgctgcaagggagtggtgaggtgatattactgcaagccacacgggaggaagaaggcaggaaataccttgattcgtcgcccgtacctgccatcacccgggtgaagggctatttctcggtccggcttccctagtcgagacattctatgtacgtacccagttgacgccgacatttaaaatgttagtgtaaaaagcttgcatgggatatgctcgttgagctctagcgtttgaagtggggaagacgggctgcagatttcacccgggtgaaatagttactacgcgacttctagagtttcgggatctgcatggataaggggtgtgtgcttgtctaaaacctgggtttgatgttgcatgtcgcaccctgtgtatggcgccctgtgcatctgtggggttcgttgatcaggcaaagctcaatgggctcgggtcggttttgtgtaccttcatatcctggaggttctttttcttggagaatggtggatacaacctttggattatgcggcgaatttgtgtaactattgaactaggctttctttaagctctcatagccgggtcatgctatactatcactagtcattgctggtcagtttgcttttcttggacacaggcgattcaaggcaaccccacattttggagattgaagagcaggtctatggctatcggcggattcactctaggcagcgatgtagctatacatactgttgaccgctgctccaggctctgtcgggtgaaataatctctcagccacatgcaggtttctttgatagccaatctagtatattgaccaacgaaataacgaagaaatcacttcttaaaggctaaaaggccgagaatatgattctcaagtggtagacccaatacgaatatatattgcagaagataaaatttgtagacaaaattatgcaataaaagggggaactatataaattccgaactgatagctccaaagttatgaacggagttctatgattaattcataacataatcgaagcagcaatttcacaagagcaaaattaagtacatattcacaaggagctttagctacaatatatgcgatattcgaaatacattcaacgtgtagacacgaaaagaggtgaaatcaagactgaacgacgtcatcgaagcaaccttgaaaacaatgattcacacgtccactacgcgctgtatccaaaacacctaaccaagtctcacacataaaccaactcaattgacagcttaatattatctgacccgaattaatgaactccatccgccttgccgcgcgatacctcaaatcaacgcagcccatccccacacaccgaccaaccaccagcatcacacaagccacagcaaaaaccgccaaaatgtcaacattcacactccccggctcaaatctgaacgtgaatagcatcccagatctaagcgagaaagacctcctctcattcccagccttcaaaacctggataacaaccctccagcactctctcgcgcgacaagaacacccctcacacgagttccacagtgacccatatgtactgcgcaaaatcgacatccaagccgtcgaccgcttcggtggcgggcgattaggcttcgtcaaattgaaagcggatgtatcgaatagccagggcgagactctgccgggtagcgtatttctgcggggtggcagtgtcggcatgttggtgagtaaagttgtgttccatttctactcgataggaggttttttccttgatactctatttcgagatctagaagaaaaaaaaaaagaaaatattacgccctagccccaccattcgaaaatagatggcttgttctaattctatgcatagcttatcctccacccaaatgatataccaaacccgactgaaaaagataagcgcgttatcctgactattcagcctcgcattccagcgggctcgctgtcgttcgcggagatcccggctgggatgctcgatgatagtgggacgtttgctggcggggcggcgaaggagatccacgaagagactggcttgcgggtcgagcagggcgatttgatcgatatgacctcgctggcgctgcaggctgcgcaggaacctggctacggtgagcgcctgcaggctgcggtttatccgtctcctggcgggagtgatgagtttattccgttatttttgtgtcagaagtctatgccggtaaaggagattgaggggttgcaggggaagttgacggggttgcgggaatccggggagaagattacgcttaagattattcctttggcggatttgtggaaggaggggattagggatgggaagactttagctgcttgggctttgtatcaggggctgaagcaggaggggttgctttgagggaataaggcttggctttgctggtagatttgtatttcataggggtttgtttgtaccaatgtatgcaagctagtgagatatgaacaattactcgctcacaacttccatttcttcgccagttcaatgccctcagctagtgttccaatcctggcatcaatagcataaccttctttctcaagcttcttcaactcgtcgaacaacgacgtcaaaggaatagtaaagcattcaatgaactcgttatcctcgagctcaggcttcgggttcttgttctcgggaagagacatatcaacccggacgtggaccatatgcaggttggtattgcaaagtcctgggtctgatcatcacaaatgtttgtcagcttcagctttacaagtcaaataacctgccagaacaaaacaaagcccgtagccaccacgtaccgttaaacataaccggactagtctgctcggcaatgccaacataaccagtctcctccttaagttctcgaacagcacattgctcaggtgtctcgcccgcatcgatgagccccgcaggaacctcaatgacaattgcatcaatgggtgggcggtattgcttctgcagaagcagctcctcgccagaatccttgttcaaaatagcgacgatcccaacgccatcaagatcgagcccggcaggacgagtctaggaaaacgcggttagcatcaaatccgaaatctaaatttcaaaatggaggttctaatagattgttggagttgggtgaccaagatcgaccaatgggtccggtacacatcgcaaggcaaccggtcatgtggttttgtttgatacagagccaggcagcgcccgggtttatgtcacctgttgacgtcccgggactggggagccccactaatgctagcccccgtttcgtgatttagatgaggccggatcttagttgggtggcttggctcccgtaacagtcctgcaatcaggtggatccctacgataggtgtgacgcatataccccggacatctaccaacagcgcgcatagtacaataagcacagaacaagggataggtcttaccgtgcgctcagctgattcccatgttcgctcgacacccagcgggtcggtgtatgttgtcttaaccattcgagcccagcgggcttcgctggggtcctgtttggtggaatgtgtcagtcgtgcattggcccttttttggtgatatcctccgcgctctgtctatataatggacttgggatttgctgaagagacccaagggagattaggaaaacgtaccaatggtccccgcgaaatgagtttcgacttggcctgtacgcgagctgacattgtaacgagttggcagtggttcaggttgaaagagagattcaatccgatgtactccatatgtattagactgacgttgctcgatcgaccaatagagcgggggcggggttagcgcggggttagcccttatcttatcagtctatgactgcagtaaggtgtccggtacagaccacttccgcactatcaagatacttgctatttgctttgcttttatttcatgcagctgcatgttattcagcgcactgaataaaccccgtcctgacctcgatcagcattttggtactcatcgcaaaccccgtcctcaagcttcacattttctaatcatcccctataaactggcaaaattcggcctcttagctgctgtggctcgtccgtggtatatattttgacttcagcatggtagttctcaacacagatgagcctcaaagcaaatattttcaataccaactaacgtcacatgtaggcgtagctgtgccctgtcagggtccatgggtacatacataacctgaaagtacacattcttttttgaaatttaaaccgattcctattctcctaccaccaagcaatagcattgatagcgcttatcgcaatggtacccgaagtacaagatatcaccgctcttgagctgtacgaagccgtcggggaaggtcgcatcgaccgcgttgaatctcttctagcagccggcgtcgacccaaatgcacgattcaacaacctaggttccgttttcacaggagtcgccgaagactgggccagcgaagacaaaagtgccaggcctcctttgttcaaccccgaccagactgaacaaccttcccttcgccgagccacgggcgagtccgaaggttcatgcagctatctcgataagcccaaggccacgcgtcttatgaatgccctgctcaagcatggcgcagacccgtatgcgctatatcggcagccgatcctcaaatatcgatatgtgcgtctttaccccgggcaaacaagagacgaagaggtagatgacgaggcgacggaccttgatcagatatgcttcgcccgcaggggaatcatggaaaaagccctccgactggaacggaaacggcgcaatctcgagcaaggagtgtacgatcccaatcgggacgaattcataagcgatttcgaaggcagtctcgacgatgtcattaagtatctagatcttcctatcaattacggcgtgcgcagtgttatccatgcactactcgagggcggcatgttcgtccagcctatatttgacttcctaggggacacgctggatgtcgaacgacgagatccccagggtcggacgctatttcttacggcgtgtcggagcagagttggtccagatgctgcgacaagtggtgtctatggcggtctcagcacaatcaactacgacactggaatccacgagaacccctccctccaaccagagaatccatggagggagttcgaagccaagaactcgaaggcctgcactgggccaacgttcctctccttttccatcgcacgtggagccgatctactggccgttgacaattacgggaataacgccctccacctgctgtttacctatacagattgcgcttggataggtttaccaccgcctatcgatactacacttgcgcacctgatcgaaacctgccccagtcttataaaccagcctgacaaggctggtacataccctttacatctcgctatctggcaaatgaactccatcatgattccagcgcgagacagtccggcatcaatctaccatttcgaaaccgcggtagacgcccttctcgctgcaaatgccgatactgcggtccgagacgggcgtggaaataccgtgcttcactatctggctgggagtagactgggagaaaaggatcgaatgggcgatgagcaaaggcggtttctgcggaggtttcttgaggacggtgttgaccccagagcacggaatgcggaaggcatgacggcactggagatcttctgcacggtcagctatgatgaatttggtgatgaggggttttatgaccggtattttgccattgggcaatatgttattggccagtttgaaaaggctggctacgacatccaggagacgaattcgaaagggcagacgctgttgcatttggttgctgggctcaccgcacctgaggggatgtcttgggctgcgtggccttggtttcaactcctccggtctaagggacttgatcctatggcgaaagacggggaagggaagactccgatcgacattgcggaggagaacgagagtatcaatgtttggttgcaggaggaacgtgagtccatggccgcatagccgccagtgatatagagtactcttttacgtgtctgcaaggtcgctagaatataattccagcaccagcgaaccctttataatggtattaaaacttcaaataactttaaatataaaataaacacccgaataaccaataaaaaggtatagttaatggtatctcattgcgcataaaaacctggttataaagacggagatactaaagaataatgcaccaggcaataagaaagtagcaatgaccggacacagtccagtctcaggcaagagttgtcactctgtgtcaaaagatatagaaacaccttttgataacggaaagtggcaacagaaaagagtccacgatactggagtggcgtgaaaccaaagaaagaatagaagaaaaagctccatagcggtctacgctcgctctcataacatcgtgggcataggcatcatcagcgagagtgtctttaaagggtcgactggacatcgacgctgacatcattctcgatttccttcatacacttctcaaactctgaccaatgatacatgacgctcttcgcgccaatgtcagtcagggccttcgccattgccttctgcgtatcttcgccattgtagctgccaacgtacgcaatcacgggaataccggcacgaaccgcagaaagagcaccagacttgctgtcctcgatggcgacagtctcggaagcacgcttgccgacctgctcgagagcatacaggtagatagcggggtcgggcttggaggtcggctttggcagggagctggcggcgctgaagaccttgttctcgtcaaagaacttgtcctgaccgaccttccggatggaagcgagcacgcggcgcaacgcagacgaggagacgacggcaagaccgtacttcttcgcggcgaaaaccttttccagctcctcggtggcaccgatgcagcttttagccttggcgttcaacttggcaatgacttggtcctcttctctgatgacgtattcttcaagcttgtcctcgtcgatctggaagtcatatttctgctgtagagagatcagcatgccgcggaagttctggccgacaaagtctttgatgagttggtcgccggtgtaacggtcggggatgttgttggcctccaggatctcattggccagatcggcacaagcctcgaaggctagctcctctgagaggaccagcgtgttgtcgcaatcgaagaagatttccgtgatctgcagtgcccgttagtgtgggtctctaatgggatagatcgtgatcgtaccttagtcatgatgaaagtgcggataatagatccgagtgtttgtttatttgtttattgagaggggatgtgagtagaagggcaattgggaagtgtggtatgacctagaagagtgggagttggagagttcgagatggagagaagaggaatgccagaaggtacgagaatcggcgattggggtatttaagtcgaggcaggacccccaagacatgacgccgcaatcacaatatcccaggggaaaccgggccagggcgggaggggctggccattgacgtggggcaggaggtactggatactttacattaggcgtgttttgttagtaaatgcaagtactagtacctcaaacctggggagacggccagatgttcagccaataaaaagcacggacccacgcaggactagtcttcttccggtatagcgtctttttctactccgggcaggtgcgatggtttcatcgcgttttcgcgctttttctcaccggcgcctttccttcgccttcgacgttgggatgtttgaaacctgccttgatagtcccgtgatattatttcattctttatgactactagagtcaagtgactttgaatatgcaagtaaccctcacctgatctctaaactacaacactgcaacatgactggatacaactacggagtatacatcagcctaccaggtccaaactcatgcacggtcatgcctccgtcttctcaccgtctacccactgttctccgaggagaggccaaaccccaattcgcaaggaaagccgggacacggaatgattgagaagtatacacaagcatgtaggcccgacgctacatccgttggtccatatttccgtgtcctctccagtcactggcgcggtcagataatatcaattacggagtatgcacttggacgttcggagcatgcttggcggggactagagaaccccgatgttagccttacctcggtacggagtacggagtgcatatagtgctattccagttccggtgagccatgagcgatctgacatatacctcattctattatcgccatggtagtgcttgagttgtgcccaaccttggaggcatccatggatgtactccggagcgcgacagtccggaagctagtatagactttctgcatagtagaatttacgcagcaattatttcaaccaatagacatggccacatttacaccaggaaccaggtagcaccactgtggtatatacatcgcacgaacccgggtccacctcttttatacaatcatcatgattggccagactcaaattccaaccctgctaattccacaacggcttcccttcacattcgacccgaccaaaaataaaacatcgcagcataacgcctgatcaatcaaaagcaatctaaccagcacgacccagcagatctcgggcgaaatcgccattggcacagcccgcacccgaaacgtctctagtacaaccccggagactggtcactgagtacgacctagccatatttgcattcaaatatacttggcaataaagtccagccaaaagaaagccaagcatggggtcgtcctcggatactttcccgaccctggagtcccttcatttcccgtcggcgcagctgtcaatctcccagacgctttcgtcgctgcgtcgatcggcgctgtccgtcgccaaccggctcgagtccatcgagaccgatgccgcctttgcgcaggacgtcgcggaccaatatggcttaccgctcgttgcgaatgagcgctgcggaagctggtatatcccgccgacggccaaggctggcagtgcttattttaaaagcaccgatggccataccggtcagtgggattttagctttcgtaggctgaacttgcagttgcttccgttggctagggatcatggggggtaagtctaacttattttgcactgtcgtcttttgcttgtggatttacatatgtgttggagtgccttttgacccaagtataaactatgggaacaactccatcactacacgatcatcctaagacatgaaaagaacgagaaaaaactgactgtatttcctttccgctgcagctgtgtaattgtggactcaactcgccgagggaaatgtgtgtaccacctctacctttcccttcccttacccatctagtcaccatgcatatcatgactacaaccaaggctcggtccccattaacccacccctagtaatgccagacgcactatcaaaaaccgtcccaatctggagcgccgtgctaaacagagccctattcccatccgcaaccgcataccacccagtccgccttccaccagattacctaggcgcatcagaagaagcacagatcgagaaccgaatcgacggattcgtgcattccctcaaggtacgcatgtgccattaacaatgactcccgcatacaacatacccttacaccgcacgcccctttctcatccatagctgatatttaactccagaacctgaaactcgatctagataatctacgccagcaactcggaaaaccaatccagatcgcctgggccaacaggacgtatttccacccgccggacctgcacacgagcgatgagtacaatctactcgtactgtgctccgcttcgaggcgcgtgcttggcgctgagatgtccgagggcggatacatccaaggcgcgggcgatgatagcgaggcgtgggcgtatgggctgacgccgccggtgttctgggccaaccaggctattttgaagagtacacctgaagacgaattgccagagcttattgaccggctggtggcggagcataagctgctggatgtggtgcaggatgcgacgctagtttcgcctacgcgcaatttgtatattggatctggggccggggtggatgttgggggtcggtatgatattgttattgattgtaatgggagtgctgcggctgtggagggtaatgcgaaacggttgaatttgggctgtgattctgggaaattggggagtcgggatctacggaaatgtctggataaggtgcgtgagtttattggcgctcgtcttggggaggatccgtcgctgtcggtgctggttacctgtgagagtgggaaggacctttcggctgggacgcttctggcgatcatttgtctcttttataacgatgagggtatgtatgcaatgccccagatggtctgggtgatgaattcaaacgctatgtggaagaaaaataactaatgttttcacaggcggcttcgatgcctcactgagcaagcgcgcgatcagcaagcagttcattcgacagcgtctagcctggctcgtgtcgtcgaagcatgacgtgaacccctctcgcgccacgcttcaatctgtcaatgctttcctgatgcagccgccggattattgacctcgagcaatgtgattacattgcgtcgcttggtcggatgattggtttcgaagcgggtcattaagaccatgccccagcgatcgctcattcgttgtccacggcctccacgatggcgccggcactgccctggtcgaaggaatccagcacacccatatcctccacgctgatgtcgaagtcgaacacatccgcattggacacgattcgttcggggttgtcggttttgggcagaggcacccatcccttctgcatcgcatagcggatcaagacctgctgagtcaacttgccgtatttctttgccacttcgactagcgtggggtcgttggctttatagtttcgcaccaggggcgaatatgcctcgaggataatgccgttcttctggcagtattcgccaatgacgcgctgctggcaccacgggtgaagctgcaagaatagaatagtcagtgacccgatcaaaccgagaactatctacgtagatagaaaagtaatagaagcagagcacgaacctcgagttgatcaacgtgaggcgggaacacttgggcatatgagcgcatctcctcgatgtgccccacaccgaagttgctaacaccgatactcttcgtcttgcccgccgcgtacagcttctcaagcgcctgccacaagacctttcgcccagcagagcccgagctggaggagtgaattaagaacaaatcgacatatccgtccgcgccgccgatcttgtgcacagaagccagcaatttatcgtaagtagcctcgaccgaggctgcggggctgaggatcttggtcgtgacgaagatctggtctctggggacgctagtggtgcgaagtgcctcgccgacttcggcctcgttggcgtaaaactgtgctgtgtcgatgtgtcggtagcctgcttccaatgccttcaggcaggactgcacacactggtttggcggggagcggtagacgccgaaaccgaggcgcgggatgccgacgctcgacttcgggagggggagaagatcagtgatcttgaaggaggcggacatcttggagatagtcagggatattgttgtttgcgaaagaaaattagttgagagtgagtatttcaagagaatcatctcctggccccgctttgcgaaaatgaggtcattccggatgactaaacgagtaaactcaaaatacgacaataactatgatagggtatgcgcaatattaagtccaattgaattccaatctacttggctatcctgagaatctctaatatatctgttcactcatattcactgtcaatagcctagtaatgtaaacacttgtgcctgcattgtacctggccaaagaattgcgtgatactatttgaccttacgcttgtttttatacagctattgcgccatcgaggaacattgcggggctgccgaacaatttagagtgttttgataagaatcagtactctcggtgtctttgtcagttctagtagatccgtctacttggttggcttctctaaccgccagtgcgttgtagttatgggattttgcctacaggatggttgtaatatatatcacaccaattcaaaggctattattgtacataggaatatcctcttgtgattttgccaccttcctttccgttttaagaactactatagataggaaggcataacctaaccgaggaaacaaaatataaacacctcctccctcttcctatgtacacataagataacaattctccgctcatgaacaatacccctagatctggtttcaagctcatatagcaaatatcagtgttcatacaggaaattatgactacgttccgctagatgcctgaatattcgagcccaacccccactgcgggctaggcggtattgagccggtgacaagccaatttaacaagcttatggcagacgggaaaaatccttatgttgtcttgttaatgccccatattcggtgctattcggtgaattctgtcatatatcatgccctctgcttccatggtttcatcttacactaagtcacatatattccccccaaagtaccgacacaaatgactccttgcagctgagacccggtaaatgaacctctgcaaagactccgtgttggtagtatgagaatgcggtactggcaagattagcagcgttctgtgagctgatatgagccactttaccatggtaatattctgggcacaatgatcttctattatcatggcttttgggtttgtacagacaaagaactagagcaatccatgagtggaacacatgtgttatgacagatagacccactcgctctctttaaggtatggcccaaaattgccgaaataaccaatgagtaaacgctggaaataccaatctgaattcggagatccttctatataacgaaccgcatcccgaaaatcaccgagcctcatgcgacgacggccacgggcatagtccatatcagggcttgatagcttgaatgtggagaaaataaaaaggaagtcaagttcgagagtggtgggagagctcataatatgtcctagaactaggaagctatatgactacacatggtggcgagcgaggattataccagtagccctcctctcgctgatatcagaagaaacaaacatcatgcctcacaccaaagaaaccggaaataagagatgccattcctattcttctcatcacgttacccatttcattaagtgagccctcgtcgttgtttgtcttatttgtgaatatgtagtggcacaaaccgaccgcccttaggatagctataagaaggcagccctgcccccagaccttcctcttcttttcttcttcttcagctctctttgcctctggcttagatttggtgtagtatctgttctggtcagtttaatcgctgatagtcctgcattgcaggtcatttctgattattctaatatttggacttcgcgacttggtctctgtgcttgcgcatgcctcgttgcactgtgtcattgggcttacactacccccgatcgacgcgaactccttttcatcaactgttcggcttgtctgggcgcttggagaagatttttgcttgggctctatgttcttatcagtggttgctttgtttacattgttgattaacataggtcaataatacttatggagttcctattacatatgtctattagctctgtctttgtcgtaacttactctcatctcagaactggggttgggggaaaagtaaccgtttttatatgagtgccttccttagtagaaaaccatccttgggccttccactttaagagtatattaagcttcatatgagcttcatgtgagcttgaagtgagcctggagttgtttccacgccgagatctttctgttaagttacagtaagacagtttcatttgcggggaagttgtggggaaagctgtgggcgaagttctgggggaagctttaaggatagacacgggatctctctccatagacttggctaagcctcaatgagtccatggtctttatatcctccgccccacgctggagggtcacgcgtagtacctacgagggcctgtgatattaatctcgtatcgtaaccaactattttcttctcggtctctgcaaccttgaccccgcactctcgctcaggacatatccgaaagtgtatccggcttcggcgattctacggcatgccctggctatagggcatagagtaagatgatattgccgacagtagagctatataaaagccgcagctaatagaactcttccctattaggttggcgaaggcatttgttcactaactaatcgacaatatggcacagcgattctggagttttcgtggctctaaattggttctggcaatttggattgaagcatgcttcggggtcatgacctttggctacaacatgggagctgctggcgccgtcctcagcaacgcttccttcaacgatcaattccctcggatcaatacggtgactactactggcaccgaaagacaaaagaattctacaattcaaggcaagtcaccgttgatatgaagtaatggatattccctaacaatcacgcatttcaataggcactgtcgttgctatgtacgcgctctttggaatgttcggctcagtagcctgtatcttccttggtgacctcttgggccgccgtaaaaccattttcattgccggcatagtcaacgggattggcaccatcattcaatccactgccttttctctaggccaattgatcgtgggccgcatcatacttggattaggaactggcggaatcatagctacggtttcactttggcaatcagaagtttcgaaagccgagaatcgcggtagccatgtctccgcgtttggtgtcttcactggatctggcctttcgctttcgctgtggacgggcttagggatgtcgttcacgcagcccaattcagtgtcgtggcgcttcgtcctagtgctaagccttttattctcgagcttgctcagtctcttcatctttgcattaccagaaagtcctcgctggctatgcaaaaagggcaagtgggaagaggctcgggaaatcttgaatcttttgcataatgaggatcccgacttcgaggaaactaccaaacagcccgggggaacaaccagnnnnnnnnnnnnnnnnnnnnnnnnnnnnnnnnnnnnnnnnnnnnnnnnnnnnnnnnnnnnnnnnnnnnnnnnnnnnnnnnnnnnnnnnnnnnnnnnnnnnnnnnnnnnnnnnnnnnnnnnnnnnnnnnnnnnnnnnnnnnnnnnnnnnnnnnnnnnnnngaggatatccggatatcgctcgagcgggctggaaatgccagtatctttacaatgttcaaaatggggccacaacggagccttcatcgggtcatcctcgctgccattcctcaaatgtttctacaaatgagcggcatcaacgttattgcccaatatactcctgtcgtcttcgagcagtttttaggctttgacgcatttgattctggggtcctggctgcagcttcccagttcgcagttatcctcggtgccatctgctgctcctggacagtcgatcgagtcggccggcggaaactcatgctgatcagtgcgactatgatgtccatatgcttcgcctgtctatctggtctattggctcatccagaaaaccgtaccgggatcaaggcagctgccttttttatatatttctatttattcgtctatgtccttggattcctcgggattccattcctctacgcaagtgaggtcgcggtgactcagttccgagcaccaacaactgggctgtctactgctgtatcctggctattcaacttcattgtcgccgaagtgacaccagtgggattcgccaatattggctggaaatatttcctggtgtactgttgtatcaatgcgctatgcgtgccgacgatctatttcttcttccccgaaacagctggacgttcactagaggaaattgatgagattttcctagcgtcaaattcaatatttgacaccgttaatgtggcaaaaggattaccgaagcacgaacatcgtgagttatatgcggaggaagaaggcaaagaatcttccagtcaagttgctcatattgacgatatgggaagaagagatgaagttgcataactgaatatgcggctttcttgtgttctgactcacaatgattcaattatagtacttgaaatacatgctcttttataggcaaagcgtaggaagcatcccatttcagttagtactcgacaaatgcaaggagctcgtaaccgatgtgacctagacattctgaacaaaaatagagaactaatgtctggcaacatgaaatagaggattgcccctctttagcccgatattcgaaaccgacctacgcgacaattgctttcattttgtgtgaagggaatgcgaatagctgggtaaggggtgttatcagtcgcaatctatgcacgaacatgtacatatcaaagcgcctactgggcatatcagtgcccggcggcggtaaaatagacatctgaaacgtgatatgaagagtaggccaattaaaacttcacatatccagaagtaccaatccattctaataatattcatgtacaaatctcccgattcaagacacaggggttgtaaacaatgaggatctatacttagaagtggatccacaaggaatgcatctgcaaattgtcacttgacaattttctcaacttcaagtttcaacaatttttttttcttcctttcaagcgctagttcgataaacacatttcttttctttcgcgttcaaatcaacaagaaacacggttgctcgggtgattttcagctccgacttgtgggacaaacacaacgacacccccacccctcgacattatttcaacaccccccctttgtgctccagtccaaatcggaaaccgagtctttcagcctctctgatcatcccagtcttttcttctcagccctagaccctgttcgctgtcacctcccgacatcattgccaatcggccctggatgtctcccgtgatcgaagatgttgacggttgagaagcagtggattaatgtgcagcaaaagaccttcactaaatggtacattctccactccgttgctctctggatgaacttcaactgacgagcaataggttgaatgacaagctaaagacccggcgcctgtccatcgaggacttggtcactgatctttccgatggcgtatgtcccgcctctcccccgctcactaatgtcgagttgctgatcgcatattaggtcattcttattcacctcctcgaaatccttggaggtgagtccctcggtcgatatgcctcgaaacccaaactgcgcgtgcaacgcttcgaaaatgtgaacaaaagtctcgatttcatcaaggggaggaggattcagatgacgaatattggagcagaggatatcgtcgatggcaatcaaaagattatcttgggtttgatctggactctgattttgcgctttaccatcagtgatatcaacgaggagggcatgaccgctaaggagggattgctactctggtgtcaacgaaagacggcatgctacgacgatatagaggtccgagacttctcaaccagttggaacaacggcctagccttctgcgcgctcctcgatatccaccgaccagacttgattgactacgactcattagacaagagtgatcaccgtggaaatatgaagctggcctttgagatcgcaaccaacgaaatcggtattccggacctgcttgatgtggacgatgtatgcgacgtacccagacctgacgatcgctccctcatgacatatatcgcctactggttccacgctttttcgcaattggagagagtcgagaatgctgggcgacgagtggagaagtttgtcaataacatgcatggcgcatgggacatgcagaactcatatgagcgccgagtgaaggaattattgcgactgatccgtgcccagcgcgatcactggaagaccgcctcattcgcgggaacatacaaagatgccaaagaacaatcatatcagttctcgctctacaaacggaacgagaaacgccaatgggtagctgagaaatccgacctagctgctctactgggaaatatcaaaaccaagttgggtacatatcgactgcggccgtatgacccaccacaagaactgagtccagaaaattgcgacaaagagtgggagatcctaacccgggaggagcatgaacgcagtcaacttataaacgaaacaatccgtgacattaagaacaagctacgccgctcctttgccgacaaggcaaatgactttgcattgaccctgaagaccttatcattggccatctccggactagatggtgatgtcgaggaccagcttgatcatgttaaaaagctaaatggcaacttgccgcccctggacgcctttctcgatgctattgcagaattggaccaacagtgcgcggaggccaatattgaagaaaacgacttcaccacatacaccctggacgagcttgcgtatgaattgagtcttgtcaaatccagcatttcaaagaagctgtctttccttgacaaccagatagttgctcgcaatatgacgaatctgacacctatccaattggaagagtttgaatcggtattccgccatttcgatcgcgactcttccaacacactccatgagctggagttctccgcagcactggccagtctgggactggtctatgacgaggacgagatgcaccaggtcttcgtggaggtctgtggagcccaccgactgtcacagaatgccggagtcagcttcgagcagtttattcgctttatggtcagcgtgacagaggatcagaatactgccgaacaggtcttccagagtttcagggaagttgccgatggcaaggtaagtgaagcgtttcttttaatctgacaaatcattgggcgacagtcacttacttctattacagccctatgtcacagagctggacctccgacactctctcattccagatgaagttattgagcatttggttaagacgatgcccgcacacgatggccccgatctactcgaggaccgggagttggccaagtacgactacattagcttcatggagaaaatgcgagaagtgaacaggaataatgagagtgagagtgagcaataaaggtatcattgaggttgatatttgcgcagcattactggtggttatgggggatttgcactgacttgttgctgctgtgtttctggtgttttcagcgacgattctcatgttttgaacttctttctggttcgtcttgcattctggggttcggtggttgttcctctttagcatgtatgtatgtattgtgttgatgtatgccttgctgtttgtaatgatcaggataccatgtgaacattttcaattatcagaccatcggtagacgtgggcaagcgaggatggccaagagactctaatatgacattgaatcaccaattcttcaccccaatcgaatctttgaagctattctagtccgatctatagatgtatgaggtggatcattaccgtattagtaaaggatatatcatgtgacagcccccagatcatcgcagctgatgatgagtctgcgactaattgtaacccttgacacgtcccactcctttcgatctttttcactcaaacgctggtcataggtgaatttcttgatcgagcgctctctcacgcatattatctcctccctcaatcccatccctcaaccataaattccaagatggaccgcagcttggacgaaatcatcgctgaagacacggtaaggctccagcgactaatgaaaccaccaaaacgtgcaacttactcattcaattgcagcggaaccctggtcgtacttcaggcggtggtggtggttctcgtcgtcacaataactccggccgtcgtcacgagcgcgatggcgtcagaaaggtacagcttgactagaaaccgaggctttcttctggagtcccatttgcatagcatcgaagctaacatcacactcggtgtccaggtccgccctccttttcctcctctgcgaattctctccttgctccgtgacaatcgtagccagtcccctggatcgttggagactcgccaacgaccacgccacggcaaagacatggaaaagaactttgcacgatatctcatctgacttggagctaacgctaagttccttcgataataacagccatacacttcagaccgtgtcgatcttaacctgtgattatacctcctatctactacggtgtgggtgatactgacgggtttctggttatagagactgggtgcacgacaaatttgacgacgaccgatgtatgtggctttcccgtactttgctgggacctatctaacagcattcctctccagcccgcccgtcccgtggaggccgcagaggccgcgacggacatgattccgatcggtaggcgcctccttcagccttaaattttaagcttgtctgacagcgctaattgaattcttagccctagctcactgaccaaggttcgcgtggataatctccactacgacattactgaaagcgatcttgaagtacgtttcaatcatactcaaaccatcacagaataacaccctaacaaaccccctcgctgaacaggatctcttcggccgaattggacccgtctctgaacttactgtctcttacgaccgcgctggacgctccgagggagttgctttcgtcacatatgcccgcctgaaggatgcacacctctccattcaggagtacgacggagccaacgctaagggccagcccattcgtctttctctcgtccccggccgccgtgaacgtaaccccctcgagtccgcacagcgccctaggtccagccttttggaccgcgtagagcgcccccgcgacgaccgtagcatgagccccgaggacagcgaccgacgccgccgtggcggtcgtgctcatcgcagcgacgttactaagcccgccccagacaacatcgaccgttacgttcccgggcaacgctccagccagcgctctcccaaccgccgcggcggaggcagacgtggtggtggccgcgacaaccgttcccaacagactgaaggatccaaccgccgatccaatgcccgtccgcgcaagacccaggaggagttggaccaggagatggaagattactggggtagtgccaacaacggcggtggtgaagctgctgcacccgctcaggacgcccctcagcagactgctccggcccctagcgcacccgctgccgacgatgatatcgatatgattgagtaatacctcacggtcactcgaactacaataaactcgcttgtctttcgcatttaagattttgggacctctatccttgcttttggacttttctatgaattcggaccaccttggcctttttccaactcttctcttctctctttccatcgctgaggcttttcagcatgagggctgaaactctgtactttacctcaaccaccaaattgtaactcggtctatttcacacattcggctttctactgctttggtttactcttgatgaaccattatccttgcccttcctctcgttgcatccacactggcgaactgggagctcattatatagttttttggggtttttttttgcattgttcggtgtcttcgttcttgtctttatatagtctagtcgtgggtaaaacccgactcgtgtacgtcaaaagtctgcatataaagagcaggaggctgttcgcaatcaatggatgatgccaagatacaattcgatagagcataaatccaatcaaggccgccgccaattataaagagaacaaagaccgcaaacgataaaaacagaagatatggtattcttccgtaaagtcttctacattgtaacaattatgagaagcaagttcacttccacagcccatagggttcgcggcatgctttccataacttgatagtaccgtcttcactgccagtgccgtagagcttgccatcaggggagaagctgacagaccagatagggccatggtgacccttttgaacctctgcaaaaaaagttagctcggatttaacaagcataggaagcaaaacatacccagctcctcatccgtgttcaaatcataaactcttgcccaggtatcattcgcactgcccgtcaccagacgaccagactcgctattaacggcagcactagcaacatcatagtcataatccgcctttttcagcaaccgaccaggctgcacgccatcaaagagatagacactcttcccagcagcgacagtcaaaatccccgcatcattaggtctcgtcgccagactattcagctcgcaagagccaatcgtgccatcaaccgcatactcaacgatcgggtcacgcgagcgcagatcccaccagcggatcttgcggtcttccgccgcagtagtgatgacattgtagtcctggttccagacgatagacttgatcgtcccgccgtgcacgccggcgccgatctcgtagctcgccacgccattctcggtggccggagaggccgaggatgggggaggcggtgtcgagcccgtgctggaactgccgccccgcgttagatcgaagattcgtagcttcttctctgcgccgcctgtcgcgagcacttgcgggttcgcttggattgggaatgctactgcacgcacgatgtgtgcgtgttgcagtgtgtgtaggcattcgcctgtgtaggtgtcccagaccttactgttttgggggttggggttagtttattggtgtgggaggtgggttggggggattttgcttacgctgagaaatcggcggctgctgttgctgagatggcggcgtcggcggagagccttgcttgccatacggcacctttgtggccgaggaatgttccaatcctgggtttgatgttagtgggtgcttcacgggtttggtttcatttgccgtaccagtctcccgttatgccatcgcggagcatggggttattatctttagtcggttagtgactatccggtaactggtgagaatcattgctttttcttacctttgcatgaagagataaagtaatattgctcgtcttcgacggtggaagagaagctcagatgcgtcaccggacgagaatgcccgtggcaagtcagagggactaccttggggatatctgttgaagacctatcagtaaacatatcaagacggtgattttctattccattctacacaaatcactcaccggcagtcattttgtcggtgttgaaggaagttccgaggtttcagtgattttgatgttaggtattagaaagacaatcagatcagcaaagtgctatgtgcccaaccgagagcccacgagttgatatcaagatgaaaatctaggaagcagaccgagagagagttcaatatgtctaaggaaggtacataagaaattcgtcagtgtcgtcaagtcatcaaacagatatgtggggttcgaggaagagccgatgacaaaggatcgaaagtggattggacaagaatttttccaaccagacacctgaaaaggagagaaggcctctgggaatacgaaactcctttggggtgtagatgggatatcgaatttcaatttcaaacaataacgggcagccctggagatcacctattaggtaaggcatgcgctaatctaattcgggtagaatctaggcacgtgatatgctattgtatatggtcgcgacagttgacggcaagttattctaattagacattgacagacatctaaaaggagacaggaaaaaatgtagcaaagcatctaaaagatacttgaaaagatacttgaaaagattactctacataacaatgacagtgaatgagaggccagaaaaggccgcctttctctccactttaacttttaagcaaggactgttcaatggagaaacagtgcagttggttcaaatacctagatagatagaaagagaagaagcaagcaagcatgtgtcaacgatatgtaaagtcatatgacagccaatcatgcagatcgtggcaaggaaaagaaaagaacaaggtaagcacaattggcccagcagaaatccataggaagttaatgatccatgaagtcacatggtagacagtcatgctgattgcgacaagtatgtctgcaaaggcaggagtcggaagaattactcaacagagcgatctaggtcttcatcgctcaaatacccacgccgaagccttgtgggcgacatggattggctcgctctggggggcttgttttcgccggccattctgacaggcgaaagtgagagagtcggcggcttgttttcgcccaattttctgacgggagggggagagcgagtcggcgcgctaggaagcctggattcgcacaactttcttgccggtgcgggagaaagagttggcacactgggaggcttactttgaggcgagtctgtttcgggcgagggagatggacgggataaccggatgggtattctccgttggaaactcggtgctacttcgaccggagctcacgatcccgaagggacacaaactgaatcatcatcggagtcaatctcactctcgtcatcctcggcggctccgcgcatcgctgcaatccgatgtcgaatccactgcaactccaacaactccatcgacggtagcggtttactctcaggatcatcggtctccaaggttctcgtctcaccgtgaataaggcaaatattttcgcctgggctttccgtaaagctgttgatatcatgggggaacgggtgctgcatcgtctcgatactgtcagaagctttcctcgtgattttcccaggagcagggagccagtggaaggcaacttccatcgatgtcttcttcgtgttaattgagataggacgaagagcataaagagtattatcccagtaggtatggactagggtcataaaggtgatgaggttctgcactcgctcagtatccactttgccatcattatcatcgatagtcattatttccgctttccacttcatcactctgtccacgccccagaatccttctaagatggaccattctatttctcgagagctattgttcagcttgaatgggaggatatgggatacatgcagcccatgtataccaaacttggtaagaacacatgcattcccatcgcgagtcaaggcctaaagattcgaagttagcattatatctgatatatccttttttccgcttaacatacggcatccctaactgctttaccacgtagcaaaactccacgtgtagcttgttccgacgaacccattggttcctcaccagacatactcgcaggcgggccctttaggcgcttcccaggagacgaggattcgtctacgggcacatcgtcggcctcgcgcttttgcccctttgctggtttctctggtttctctggtttaggctgtttcctgcccgcccctattactaatcgaatggccagtttagtattgtagaagtcgtcttcgatgtacttatactgcccaggcacgtcaatgtaatggggcaaaaattgagtctttatagctgtcttcatatccttatcaggattttctgtcgcaaactatctgagtctatcgatatcgctaaaccataacatgaagaacatatggcgagtcattcggcgcaggaaagggtagagacgtatcatcgtctcgactaggcttcggcgttcaggatcttgaaattcatcaaaaatagtgactgtatcatattttggctcagttggttgatccatgatggacaaaaaaaaagattctaagatgatggcaacgatatacttgatactgttgcgtggttggcggaaaggaagaaaatagtgggactgttacatctccgccaccagatcggtaaggcggtactggaagtccaacaacaacaacgggaagcaagcaggcaggcaggcaagtaaggcgtcagctagataattaagatggggagaaggaaagaagaagcaagtgcaaagtggaaggcagccagttgatatagctgatcaatttgcaaacgttgcaaaaaatctaatagtaagcgagcaagcaaacgagcaagcaagcaaacgagcaagcaagcaaacatgaagcatatgatgaaggtttagtagatcttgacacaagcaggcaagcaaacaccaaacaatcgtgctctccaacaccaaataagcatgtactagtaatcccgacagcctaaggcctccgggatagtcgttacagagcgaagcgactggttctaacctctaaggttacgtaaggtctccctcttgagggctgacctctcgatatcggcgcctaaggcgtattagagcgtgaagggatatagaatatatcgtctagccggattagaggtagccagaaacggccagctttcacgccttccaagcaagtagtattaataccgtctgcatctttgcatctgctactatctgctgtttgtttcattgaattgtttgctagatagctagatagctaagcaagatgctcgagctttacaattgcgtcttctttctttcatcatttttcttatttagtttagggtgttgatatgaccaccccccccccccccccccccccccccccccccccccccccccccccnnnnnnnnnnnnnnnnnnnnnnnnnnnnnnnnttttttttttaagtttggggttttgtataaccccccccccccccccccacccttggctctgactattgaatgataatgttgagatatatcaggctgtcagattggatagttaaaaacagtcccaaaaaatgctatggataacagtagccgcaactgtagtcagtggtattcagtaagtatttgacacctattccattttccacggcctaggaactttaagtcttacttcaaatgttacttctctttcaggttcaggaaggggatacgtgtgcccaagtatctctggctcagtctatgtctcttacagatttgtatttcctcgatcttgacgatgcatattgcgtcaaggccgttggttcaatcactagctacccaacttacacggtgactggttatctgttggcatatgattgaagtgacaggagtattttgtatgagacaataaagttgaattctcctaatgagcgaagaataaaaattgtgagtcttgtaaccgagttgactaatgtagacaccaaatgccaagactcggaatgtagccgaaccgtggaacctgcaattgctccgctccttaaatccacttcgcttcccgaccccgactaactcagacaggtacaagtgttttagcctggaaacctgccgattcgtgaaactagagcgtttgagagaacaattttatctctaccttcaaaccctgcatctgtggaacctgtttacccgtggaccgtggtccgtacccaactccctaacataccgagctttctgtttttcttccctgtcacttcataacaagagcctgggacccttcatcccaaaagttaacagatccatgattaccagaagagctcttgaacttcatgttttcctcgcatctacagccaatacgccctttattcccgcccgggtatccctgggttctctactctcatcaataacacttcacgtacttcacgtctcgctaagtcatcgccactgtatctcagtaacacaactaccttttcaagaacagtgtttactccttcgaaacgtgatcccaaaatgaaatccgattcgaatgaggccgataggcttgaggcgattcttaaaaaagataacttcacgatatagggctttgtgatttaccactgcacgtaccaagatgatgccgagtgggagaaatttatgaaccgcttcccaagcgcagttctagagtacctagagttctatagtggtcttaatctcctcaatacatttgccccgacggtcttccaagacccctcgttcaaggctgcgacggtagtcactctccgcgagcactttaacaagtgggcaaagactataaggaaagaggaacagggtgttagtgaagactatacccgtacagggcgctatcgatgactggcagtcgtattatatgcgatcgcctggggttgcagctatttcttgatctctagtctcgaagtcttgctggagatggggattgttctgcatctttaagtccccgtagctccttgtatatttccgatataactcatacatctgaatgaaaactacaattcatgaaaagggccaccggccccgaggtacatattttaactctttttttaagatcgacctaacatctcacaagtatgacgtgttagtcaatctcattcgcatcatcctcggctccgtgcatccctgcaatgcgatgtagaatccactgtaactctaataactccatcgatggtagtggatgctccgctgcaccaacaaatttggtgcagtgaaggggagcgacgtatcatcaactcgaccatgcttcggcgttccggatcgttaaattcatcaaaaatagtgactgtgtcatactttggctcatttggctcagttgggttggccatgatggacaaaacaacagcttctaagatgatggcaatgatatagatacagttgcgtggttggcggaaagaaaaaaatagtggcggagatgcgacacctgatcagaaaggcggtcctgaaatgcatgcaggggggtaaggatgagaggcccaagtgcgtcagctttccttgtcactactttcacaatggtttagatttaggtatccgagagatgcatatgcaggtaagatacatcagggaaaatgctcaatccctttagagcaggaccaaaaaaacaatctaatgtgttgatttctatggggcgagacgggatatcttcgagtcttgacttctcaccgtcctttcactgtagttaatcaagttgaaatgtttgtttgttgttccataacgaggaaaggaatcaaattggggtttgtgaatcttctatgttgatgtgatccttagattggctaactggaggagagatggctgtccactatgttgtagatgattccaagcttgcccgaggattcactagttagtatgatagacgaatgagtcacttgaggaccacctgagcatgtccttgcctagggctagtacttgataagtaagacctcgtgttctagcaggttccccgaatggcgttaccgcccacgtgatatgaccattgatgcttcggcggggcgatcccccggaacgactaaaggacaacaacatccaggggagcttgattgatcgttaagtctgcggtgatacccttgaattatttcttctttggattcctctttcttcacgatttcttccctcaaagttttatgtatgcctgacttcaagctctccgcaactttggagggccacggcgatgatgtaaggctcctggtccaggcgtctgtaccgacgccattgaccgcaccaaaccagacagactactcacattattttggcctaatctaggttcgcgctgtggtcttcccaaatccaaatgtcgtcctttcggcctctcgtgatgcaacagttcggctctggaagctcgtctccacttcacctcccgcatacgactataccatcgctgcacatggcggcgctttcatcaacagcttagcctacattccccccacacccgagttcccagagggccttgtactttcggctggacaagatgcaataattgaagccaggcagcctagtaagagtgcagaagataatgcagatgctatgctcctaggtcacggccacaatgtctgttctctagatgtgtctccggatggcaaatgggttgttagcggcagctgggattccacggcccgtctatggaaggtcggcaaatgggagtgtgatgtcgtactggaggggcatgaggcaagcgtctgggccgtgctggcctatgacgagaacacaataatcacgggtatgctagcttcatgtcgccctaacaaatccgacaatgctaacatcaccgcaggctgcgctgacaaaatgattcggatgtttaatacctcgggaaccctactcggaagcgtacagaactccaacgatgtcgtccgagccttgtgcaagcttcctgcctcgaaccctacaggggctcactttgcctcggccagcaatgatggaatcattcgtctttacacactgcagggtcaacttgtcgcctccctgcatggtcatgaaagctttatctactcccttgctgcgctcccgtctggcgagctggtgagctctagtgaagatcgcaccgtgaagatttggaacgggacccaatgtgtgcagacaataacacatcccgcaatctcggtgtggagtgtcgcagcttgcagtgagaccggtgatatcgtcactggtgctagtgaccgcattgctcgtgttttcagcagaagccctgaccgtcatgcagccccggaggccatacatcagtttgaccaggccgtcaaggagtcggctatcccagagcagcaagtgggtaagattaataaagaggagctacctggtccggaatttttgaaagaaaagtccggaaccaaggaaggccaggtccagatgatccgagagcctggtggtaccgtgagcgcccacacctggtcatcagcaacacaggaatggattgccatcggtatggtagtggactcggctggaagcagtggtcgaaagaccgaatatcatggtcaggattacgactacgtcttcgatgttgacatagaggatggaaagcctccgctgaaactaccatacaatgcctcgcagaatccatatgaggctgccaccaagtttattggagacaatgaactccctatgacctatctggaccaggttgccaactttatcactcagaatacccaaggtgccactattgggcagtctcaggaacccgcaggctctgatccttggggctcagaccgacgttaccgtcctggagacgccgcagcggctgaagagtctcggccacctgcccccgagtcgcgccctaaggtgctccctcagaagatttatctctccatccgctcggcaaatcttaaagttatcacgaagaagcttcaggaattgaacgcgcaactcgtgtctgatggatcaaaggacgtggctttgagcccctcggaggtggaaacggttgtctccttgtgcggccagctcgaatcttccaaacaactccaactttcacccgaggttgaatctggagtgccattgatcctgaagatcgttacaacctggcctgccgccaatcgactccccggcctagatattcttcgtctactcgcggcggctgcgccatttacagcatccgccgagtacaaagacgaaaatgtcgtgtcgggtgtgatatccagcggtgtttttgaacctcctcttaatgtcaacaatgcaatgctcgcaatgcgaacatttgctaacctattcgagacgactgccggccgtgatctcgccatgagctcatttgatcagatcctggcaggagtgaaaactgctttggctagcagcggacaatcaccgaaccgcaacctcacaatcgccatcacaacactctacatcaactttgcagtttatcttacctccgaaggtagagaccaatctccagaatccgcagaacgaggtctggtcctcctagaggaactaactcagatcatttctggagagaaggactcagaggcggtttaccgagcactagtcgcgctcggcacactggtgacagcgcttggagaggaggttaggagcgctgctacagaagtctacgaggttaaaggtattcttgcgagagcctcggcctctggtcctggaaaggagccgcgcatcaagggcattattagcgagatccgggaggctctctaagagtgcgtgctattttttttattcggtatgcgcagattagagatgcattccttcctaacgacgacaacgcgattcccaacaaaggcaattcatatcctcattttccacttcacgtagatacatcatagatgtttccttatttttgaatcaactagcattctgaatcattcattctaaatcattcactactcccttacaatctgccctccgcatcaaccccaatctccaaaacctgatcaacgccctgatacttgggcaaatcaagcccatacttatcagtaatgttcttcgtcaaaaacctaccaccgataaaatgcctgccgtgataaaatgccacgcacggcttaggtgcagacaaactgatcaacgcatgcggcatgaacttcgcaccgggtccttccttcggtggtccggtctggatatcccatgagctgggcgcatcgacactcagcaccgggacattggcggactcgatttgcgagacgattttgtcgaatggatcacgcaatggtccgccgaaggagaagccgaagatggcgtcgaccaggaagtctgccgtcttcagggctggttcaaagtcgtcaacgaaggggactgagaggttatgcagttgggttttgaggcgctggcttgggtcagattttcttctttttttttttgcttctacgatccttctggtttgggattgcgtacttcgtaaagctcctttttgccctgctttgggtagtacagagacggggtgtagccgaattgggctaggtggcgagttgctacgagaccatccccgcctggtggtttgttaggttgctgttgctcgaatggcaaggttggagatacttctcaccattgttgcctggtccgcagacgactagaactttcttgcctgcgcttggggggtggaccctccagactagttgcttgtatcagtatggcctgactacatgctcgagattgatggttctgaccggcttccgcgacagagaggcctgctagctccatcaactggtccagagaccagccgccgacctccatgaggtctttgtcaagtgatgcggcatctttggctgagattgcctaggaacatggttaggttttgagatggagctaatatcagacaactataccttcaacgacattattgctggtttactgtagcgacgaatggagggaggtagacggatacgggcgaatgtagaccggatcatgtaagtactttagatatagtctttcgactaaatgagcaattgacagaaaatgtgtaaatcaaaatgacagccagctctgagtagatctactgagggtcctcacgtcattacatcatacatcatatgggcgctaatccatatttggctccatcggatcaacaataattccggcctagaacttttgcggagggcagacgggatcatcaaaagaacagtcttgcgctctcccaattgaaacagcataacgcacccgccaagatggttctccggattcgactcgcccgctttggcaacaagcacaaccctttcttcaacatcgtcgttgcgcaagctcggtacgtggtctttcccccgtgaatggatacccccgatacgcccggcctccaacgccaaacacggacgttgtcaggccaaggagtgcttcaattgtgcacatatctaagatgaactgaaattgaccctatgatcttcagctctgcccgcggcgccaagcccctcgaagtcatcggcacctacaaccccatcccgaaacgtcccacgaacttgtatgatgagaataccgaaacccgtccatataaggagattgccctcgaccggtcacgcgccaagtactggcttggtgttggtgcgcagcctagtgatcccgtctggaaactgatgagcatggtaagcacccttgtttgtttgatccgtgagagttttgggaatcaaggatctggacggctattgtcgggccttcgttttaagcagatcacatggacggggattacgttgttattatacggactgctttctgactcttaacttatcttaggctggccttgttgcgcccaaacctactacctttcacaaagcttgattccgactctttgatactgtgtctttccatggttttcacctccgacattctttgtgtactcggacggccaccatccgggaatttcaaggcatggtactatcagaagtcgcgcagtgtttctttattctttcctgatttggcatttttggcgttattgagttgccttgtgagaacctctgtatattaagtggcagcctgactgctctgagtctacgcggtagatgagccgcatgaatatctactgatatgacttgaatttgtctaggcggcacatacttcggaccgaggtagcctataccttaccagcatactttccataaactgctcatatattgttgagtcatgaggtacatagatgctactaaaccacactcgactaggtaaatcttaaatggatcggataatacccttggaacccgatcgtatttgtcagtaaacctgaaagtcaaaacatttgacgcgcctatgaccagttcaggcacgttgtgaagaagtaggtgctagtaaagcccctaaacagcggcttctctccacggcccaaccaaatgaactatcggccgctcgataagcccgagtcatttccctgtcgcagccaatcccatctgttgccggggttgggcccgtggcaattggtcgatgaccctggaggatcaccgggttttgactttttagattccatgggcgtacaacgtatgcggtgacttttattattataaaatgggttggatatgtgatgtacgtggtgatatgtctcatgaggtagtcgatatcgagccgttggctattgcaatctgggctggttgaagtagatatacagtatccaaggttccaataatcggtattgtattgacttggtaccagcttagggttgcctatccgagtctacattcaataaacatgcacctagtatatgtgtgtctcatttcaaagagccccatcgcgtgcagagccggggaacggtaagccgcttaggcactgtacttgcatggccggtgctcagcgatatattcatgatccaccgatcttcagagaacagaaaaagaaaagaaagaagagaaacaaaaaccggggcattccacagtcaccaccggtcacctcggggcacgcactgggccagtgtctgcatgcggtcggtttctagggccaaaggtgtaagacggcgtaaaattgagtccagattgtgtaaagagtgtgaccaggtactgtcatatacctgggagtacatgcagtcacgggcagacatgcatagaaccccatgtaccgctctggtcacataccggttccccattgagtcgcgtcgtgaagggcagatccatggatctggcactggtggactggcactcgaccgttccggactcttttcttccccccctcccctgcactctccttcatcccctcctttcaacccttttccctgcatccatcttaccattcgtgtcaatttccatctttatctcaatcgttttcaaagcgctcatacctgtcgcaaatccgatgagacaccattcgagtgcactcgactttcgatcgaatcgctaatcgccttcgccttccttcatttctgtcgttgcatcgcgcttggtgtacggtatcttgtcgcattaccgatcactgccccgacctccgactgtcaaaaccctgcgactccttttttcttcattaggactatcttccccctgtgtgatcgcgaaaccctagaaaaggcgaaaaaaaaaaaaatccaatttttttaaatctcgtggagggatgagcggcagctctagccagtccactcgtacgagtcccggctcttttggaactacgcagctcacagagtccgtgtcatccggttcgcccccacagcagtcactcccttcttcgcaggtgcctttgacggctcagcatgcgatgtcgaccgacgtgtacagtccgaatgcgtcgcaaccgccttcatctatgaatccatctttctcataccctttctcccctatcggtacaacagcttcattcgataccaacatgcgcttaggcgataacgatcgcaacctccagggtctaaatggcctgaatcgcggaaacggaggcgccattctcatgcgcaaactgccgcgaaatacgagccgcgaagccctgcgcagcatgcttctcttcgccaaagactttgtcgacgccgactttgtcaccttggacctgcccgaggatgatgggttcttgactgcgatcgcgcgattcattactttgccagccgccgaagaggccagatcactcctcgatggcaagccgaactccaaaaacgacgccaacatggtcgtcgagatgtaccccggtccgatgggcgcgaatctgtccaacacccgccgtaacaccatcgatcacaccgccacccgtgcgttaatgggtgcctcgaacggtcccctggcgcgtcaatcctcgcgctttaacggcactttccaaagtttggagaggctatccaacgccaaccccaatcaggctattggcgaaggacttcctccgacctccgaatcgcgcatgcatagccttttctccccacaatctccgatcggaaatggcattgataaccttccacgcataactgggaagtctatgatcgatgaggacccggacgaggagacgggcgagctgctcaaggatccggtgggctatgcggagaacggccattcttccaatatctccgctgggcgccgagcgaccaaccctcaaatcccgaccaaccgctttgccaatatgtccctatcaaccaacatgtcctcgccacctttgcagaactaccctggaggtggcgcgcaacgcatgggcggtggaacacccacatctggatacccgaaccaaggccatggttacccatacaacgctcagcataccccacgccacagcctgcctgctgcgaacccgaatgacctgaatcctccttgcaacactttgtacgtcggcaacttgccgccagacacctccgaggaagaactcaaggcccttttctccaaacaacgcgggtacaaacgactctgtttccgaaacaagcagaacggacccatgtgctttgtggaattcgacgaggtcgccatggcaagcaaagcactcaatgagctgtacggctacaagctgtcaaacagtgtcaagactggcatccgtctcagcttctcaaagaatccgttgggtgtgcgctctggtcaacccggcagcatgaactcatccaactcgccctctgggcagggcgcagtccccggaggcagcagcttgagtggaatccacaacaacatgttctcggccgtcaacggccctcctcccggactggcagcaccccctggtcttggcatgcccatgcctgcgcctccgatgcgcaatggcacctccatgcacaaccccgtcaatccgcatgctcaaatgatgggcaatacttcatacaacccgaactcgggcctgggaatccgaaacggagccaattccatgatgatgtcgccgccgccccctcctaattccggcggcaacaatccgacaccgaacctgaacggctataattccttttaccctgactacatgatgggtcgctaagcccatccaagcgttatattaagataatgcccggcatgtttgaacgaactgggatatctggcgcatttggggatcttcgtttcgtgagctagatcagcattcggcggctgcataactctcgggagtactgtttcggatttgctttctgtttttttctcttcttttctgccagtgcttttcttggctttcgtatttctgttgcatgggaacctgggcgctctcacattcctttttgtgttaattcgtttcattgggaggattgcatttcaggtcattgccaaacttgtattcttatctggtcggcgcgaggcgctcgagagcgcatgttagtttctgtcggccattgcgttttgttcacaccttcataccctcttgatttcttgcttttattctcgtttatctcgctcgttaccttgattcgataagcaatgcacactaatgcgtgtttgctgtatgcctacccaggatctatacgagctgttatctactttattccgtgattccccctgtttgttacatctatcccctggatctttctcgatgcatcgtctgcgtggatcggaaaggatttcgctgatttacttgctttatctattgcaatgcgtgtttatttctatgcaagtacgaaggaagggtcttatgtggctttctttgacttctcttctaatatctctctactcaaatggcatgagcgcgaaaggacatgacatcggctcacctcgaccacatattgtcccaggcgttcgcgttggttttatttctctgccatattcttcctgtctcggcggagacaaaggcgtccggtccatgcatttgctcgacagctcctctacatcttgcttgcattgccactcgttttgctttgggtctggcttactctgattttccaggagaagaatggaagcgtggcgtgtctattttttttagtcttcttcttatcccgtcttgctcgggggtatgataccgatacatttgcttcgatctgtacttgatacaatgaactggttccagtgaatctggagaatgaactcattaatcctttcataataatgttagtctgtaagagctatcatggacttttgaactcctttggccacttttcgtatattttaggatctgtgaagtcgaccttggaaggctttcaccgtaagattaggtagatacatatactcaggtgtcccaatatactccgtacagtatgagaagatgtttacttctgtacatattcagtggggataggtcacgtgatgacactaccgagagaagtttcttcgcctagacacctacacttcccgctccaacccgacaatctcccatccgcaattgttgctgcaaaagggtcaatggcagctggaactccttgattattattatccagcgtcttccattcagttcgacatcaaagtttccctcccattcacccatcatatcctccaagatgccaccccggatgcagagccggagtgtgtccaacacccttcttccctacctcacagctacctcctcatcctcactctcttccattccttcattatcctcttcatcatcacaatgtctttcgcgccaattttctgccacggcagcaccacaggcacagaccaagcttcgtcggcaaatgttcgaatggctcaacactgaaggagccgttttcaagcatcacgtccctggcgaaaccaactatctgactcggttaaaacagcgcggccccgaaacttcctcagatgcttcccgtccgttccccaacaattcaagtttcatcagcgagcctatcctcagtgaggagctacggaatgaggtctatcaccgcgttgttgaacagaagatgagtcttcgcgctgtcagcgtacatcttggaattgatatgaagcgtattgctgctgtcgtgaggttggtagaattggagaagagacaacgcgcgcaggtaagaccattttcccttctgctgttcccctttcccctttcctttcggaccctgcttcgaccctccacgcatatgatgagtcacaaaaaatcgattagtcttgaagacacccacatggttaaaccttactttttgaactgaactgtgttaccttacattttggattcctatcaccttttatttggtcgcttgagaactgacgaatctcaattcagggtaaacccctagcactgccatatgcccgggccatccacgagatggtccccaccacacccctcgcccagcaaggcgagcgtcaagaataccatgaacccatcaacgacctccccgcccatcctttgacaggttcccaaatcttctacccagttcccgaatcccgctccttcacccgtgtcgaggctggtcgcgtcttctccggcgccccagcaatggagcactccgaggccgcggaaatctcccacccctccgacctggccgaaaagatcatcgaggaccccaactccatcgcctgggttggcaagggcgccaacgctcgccaaatcctgcagcctgctgacgtgcgcattcctcaccctcacatggttgctctggagcgcgaccgcctcgcgcatcccaacgagcgtctggccgtttcagaaaagcagtccaagagactcaagcgtcaggacgcaattgagaaggagcgtcgtgagcgcttgcaggctcgccgcgagaagaagctgactgttgtctctcccgaggactcgcgcttcgactaccgtatcaaggatactatctacactccggagacgactggcgctgatggccgtggttcgaaggctgttggtcgtcggtacggtgtgcctcaccgcgaccgcacacgcggcgaaatcaagattcctacccgtgtggaggcttgatttatttgagatggtcccttcaaggactgtttcttgtttttttgtgtttttcagcaactttttcggctacggcctttgtaattttagtatgcatactcatccaaggatgtatgatggaggatgtcgcttatgtactataaccggatgatgtcgaactctttccatttcagtcacctcttgccgcttttaccactcgagtacaactggtgagccttacataatcacctctctacggggataatattaagagtgaagaggctttctcccatagaccgccactctgctcataattagtactcgtacccaggccattaaaaggggatacgttaaacccacgtctgaacataagcatgcaacttcttatcccgcaactcccgcttaacaaccgcattatgaatcttcgcgacatcggcactccagcccagcacctgcgtatacaagcgcaacgaataagaatcaatagcctgctgcaactgcacagcctggtacttccccaacgccttcaggtgcggatcgcgcggccaaggcgagaacggcagcgcgtagaccgacaagcgcacgtcctcaaagcccgccgcgatcatccagtccttgagcttgtggtagatgttcagctcgcggccgctcttctcgccggcgaagttcactgcctgttgccattccatgagcgcggaatctgatttcagcgtgccgtcgtcgctgcgggcccagacggcgctctcgtgcgattcgaagtacccgcctggtttgaggtggtcgtagatttggtgtataaaccccggccagtcggctacgcatctgcgtggtgtgttagtgttactctcgttagtatagaccgcgaatgcggtaatgatatcagttaccctgctaggcatcgtgcgtggatgaagtcgaagtggtttcgttcgtactgccattcgctttcgaagtcctccatgatgaactcgatgttcggggctacccagatcggctggatagggctgatgtcattcccaatgacgtgggcgctggggaatttcctatagtctggggtttagtcttgccgtatataaaaatggacgatgaagggtttcacatactcggcaatgtccatagcccaaatgcccgttcccgttcctaggtcaaggatgttctgcggtgatgatgtgatcggggcattgtagagctctcctcctagcagcatcagccatctgcgccgcttggttagccacattcgttcggtcgttcgggaatgcgttgctacacggacatgtgatgtgtctgaagaaagagtcagtgtgtgcacatggaaagtcattagttagttagggatggcagcgtcttaccagatccattcgatcctgctcctcctcgtcattcggcatcctaactcggtcagcctctacctagaggaacgtatgaaagtgtgcaagtacatataacctccctagtcgtcgatcgattggtcattgaagcttagtacgaatggtatgtatgtatggactacttaccgagcgggtactgcaataccgccgaccattttcatactcgaattccagcacgctctccgacagggaggtgagatcggacagctcgtcgtcgaattcactgttagtgtcctacaagtcggttaaattcccggtgtcgcgatgggccagacggtcgagtgagtctacatacgtcgccaaaaatgtcgaccgcgattggagccgcgttgacaggggtctgcgtgtcaggctcggcgttggttgggggtacagatggggctcgttcggatgaggaagtatcagaaaccattatgatgggaaaggagagcaaaagcaacggcgaaatttctagaggaaacggcgctggataaataaaatctattgcccttttctaacagcctcgcttgccgattcatttgacgcgagtggagggcttttgggttttatccaaactgtcgggttcaaaggagacggggactttggatctatcgtgcattctgtcgcctctcaatttgctgattgccaatgggaatcactggaagaggttggcaatcaaactccactccacatatcgttgtctttgaacccattggttcactggttaatatcgaggtggcccttgacaaagaataacgggtcttggtgcttcactatgatgggtttaaggtctaccggtcccacgtgacagcgtgctcagctttactcgggagcggaaagcggcatggtctcggcactaaaacggaaggtacccggacattgtatgcctcgtctttgtacatggaactctctaggactgaagatgtctgaggtttttgatctattgtactggagtaatcgcagttatttcaaactctttatcttactgttctggtggtcatgccaagtacttatccgcgttcctactatatataaccaataaacacttcgctaatgtcatacataattcattccctaaccaattctacaagctcaaaggaaacgaaacaagaactcgaaaacatataaacccgaagatatcaaaatcacaatgcacagcgcttcgccaagataaaatcaaatataaagagcgacagatatgaccagcagatcccgctgttccatccagcctccattcctcccattctcagtattagtcagatactagccaactctcaacgagcctccccgacagatcgacagcgtcgtcttctcgccccaacccatccagagatcgcatcggactcagagtcgtcttccttggaagaagtctggaaaatagagccgagtgaggcgagggcactctggagccatgaagtagtagtaggggaggctggagcagatggcatatttgctgactgcatggtcgagctgggtgaggggtgagatagtgagatagtgagatggcgagatggcgagatgcggggtttatagtttgtggttggtggtttgcgagaggaggtctttggtaaatggtatggtacctggtctggaagacaatgatagacgatagacaatagactggtatgtaggatatatgtaggggttggaatgtaagatagagagaggttcagggggtcagcttatggtatttaaggaatcgaagacaatacgaacatcacatgcgaacaatgcccagggagacgacaaagcccggatctggatcacctgcataagtacctaaatccgggcttcgtattatttgctttcaacggttccccgggttgcttctcctacttcggtcatgctgctttctcttgattggtgatgtgatcatcgcattgtacagatttacgtattgattcggccttgcacatagggcttgttatgcgatcgtcgcattggagcaacggctattggacgagtctttgccttgagaggcgttgtactgcgttgtactgcgttggatgcgagcagatctgaaaagagtaaattgtatacaatgtaggctcttggttatttgcgacatttttgtctcggtccttcgggagtatcgtgagacttacatatgttagtagagatagacagaagccatacatcgtataatttcaaatggctaggtgtatctgcatggatcatcacccctcaaataattagtgagataagtacaaggtaggagaatacaccaaggcctccagccggcagtcggaaacaaagaaaattatacattgaagaataaaagcatggacatctcgttcgtgtatatgaggatgtccattgcatagaagttgtatgcaaaagtaaatatcggtagacaaaagaagccagccacaaaggcaatgtgagcggcagacgcgtatgcatcgcaaaataacaaaatatatccatatggccaaaagaagatccacgaggaaaaccatgcaccgggtctgaggacctcgaagtgaagtgcatgccaccatgacaaaaatatgaaagtataggaaaagagacgttgctatacggggtattcaatgggagagacagaaaaccaaaccaaacaggttgaaaaaaagagtgatgggagcgtgtacggaccaaacaaccaaggtatggtaactcatccaaatacagatccgtcttcattcttcatcaagaggcacgatcgtcgcatcactgcctggcgcgccgtctcctgatgttgaatctatactgtcgagacttccgctaccccatgaatcctcccgcatgatttgcgcggcttctggtagggttggcttggtctcgaagtgattggacttgttagcgggccgggggatcgagggcgatgggggatccacccgtggcggttctttgcggtagccaccttgcatcgggctggatgatgtatcaacagttggcgaggcggcgcgaggagaatccatgaacccgcgccatttgcgccagccttcaaagtcaatcagggcttgcatgcagccccattctgtaaccttttgctcaagccaagggaatccgacgggctattcgagacatattagcatattatttggaagaataaaataggagatgatttaccttggtcaagaaatcattgcagccagcagccaatgcctcatgtcggtcactttgcagactgctagctgtcaatgcgacaataatgactggactccggaacagtgatagatctgacaaagtgtcctcttcactgaccgtacggtgaagcccaggtcttctctccgtcgcaggcgtactggacgcgctgaagcggccagaggctgtcttcgggaagacaccaatgccattcaagcgctccaagcgccggatctccttggtggcttccaggccgttcatcacgggcaactggatgtccatcaggaccaaatggaatccaccttgtcgccattttcgcaccgcctcttcgccgttcattgcacacttccagcgcaccttcaaccttttcataaaggcctccaaaagcttctggttgatgatattgtcttccacgatgaggacattgattggcggaacggtgccgtcaatcaacccgccaaacatagcaccaggagaagtggctgctttcgtttttcgcatcacgcgtggtgatgccgttgccgggggagtgtgtgatttcacctgcggagactccaccggcggtggtgccgcggggggtgtaggcattgagggaggaggagctgggagaggttgggaatgaggagtagggccagtttctaggcatgtcagtggctatgttaagtaaaaaaagttttttaaacgtacctgttataccgggagtttgagtgttctggttgtgaaggatagtgggagaatttgttctgtgtcgtgtcagaggaggtcgctgatgccgtgccctacggctgcccggagatggcagtaaaggagcgacgccagtgttgaggatggaaattgacggcgcattggccgctactgatggagctcccgagtgtgcagaaggtgttcccgcgttcaccttgaccggcggcatgagaggaaagtaatcgccatgttcgccgggttctgattggtggtactggtacattgaatggcgcggcgatggctttggggtccgccgtgacggggcatcgatcaccaatgcttcctcgatgttctgtcctccagggtagtatgcatcgagtatagatattaggatttcctccgggctcaagagacgctcagtgagacctggtcgattcgagccctctcgtggcaaaattcgaatagcaatatcaggcgagtcgaagcttctccccaatgaattcccgtatttcatgatgacatggtcgcgtagctcatctaccaccgcatcctctctgcagggcaccaaggtggccgagccaccgggccgtttgacccaaacccgacgtgtgaccatctcgcaaggaacaacgggcgtgaaaccactaggctggtctcccgaagaaaaaacactcgcgtccagtagcccactaatcaggtggtggtgtgtgtctgggagaagagattgccgacggatcgcaaggctcgggcgcttgcttgaaggaggaaagtaggaggtcggagggcgatcattcgtaggccactctgcaacagtatgcagggtcggagtcaatggagtttcgggcaggattggtgtctgagctttcaagtgggtggattggaaggaggtggtatcggaatgctgaggagtcgataacggaggagtttcaaggggagacgggagatcgcccgagataggagttggcaaggtagaattatatggctcggtcaacggcgtacaattgcgagttcctgtgtgaggctgttccgacggcgcagaaacagaggaacccagttccgggtttgtccctggggataggggctcctgtacctgaaggatgcgagaaggagtgatctcatccaaatgtttcgaagatgcgatgctataagctggggatttgttggagtcgagagggctcgaggggggttttcggttgaagtgggcactcggatctgcatccgcttttggagataatcgaccaagcaacttcgccttcagacgtgatatccgttccgtcattgtcgagtcttcatgccattctaagacgatagggggagaaaccagattctaggtaacggttgttctctgtcgatcgagataaagacaatctcgtactttttccggttcagacacgtcagtatagaccaagtcagagatgtcaaaggttaaagaagttgagaggggaaagtagcgacttgggcagagtcacgttagttgctgatctcccgggccaaaaaaagctatggcctttttaatatgcaaggattcggggggtccttgggcttttggggggggggggaattttaggggatatatgaaaaggnnnnnnnnnnnnnnnnnnnnnnnnnnnnnnnnnnnnnnnnnnnnnnnnnnnnnnnnnnnnnnnnnnnnnnnnnnnnnnnnnnnnnnnnnnnnnnnnnnnnnnnnnnnnnnnnnnnnnnnnnnnnnnnnnnnnnnnnnnnnnnnnnnnnnnnnnnnnnnnnnnnnnnnnngtgggggtggggggggggggggaattttagaggatatatgaaaaagtgtcttggattaaaattgggcatctcaattgttgggtttatttttctgttagcgacgagcatagatatagagctggaatgtagtatacctaagacccttgagcttgtatagctcgtcaactactcctatacctatagcactcttattgcagaaccccttaggtggcctgatcttatccaacaatccagataacataatacacgacacgattcacgattcacgatctacagataccccacaaaatagcctacgtggcacgcccaaaagtaccagagctagccagacgcagggccaatggttctcagcgtcactggaatattccgaagagcggcatctggtgttgcacttagtagcaggatataccatccatcttgtcctgtcggtggggcgtagaagttgatgttgtcctagctgcacataacatattttccatatgaagtccacacattggtttgtggtgtcgatgcgctagtcgtgtttgtagcaactgtgtctttacttgtctggccacttggagtagtaaatatgaccggacaagccattgcgccagtatccctcaatccaagcagattggtactagaagccacaccagctgtggtgaaaatggcagacttggtactagttgaggtagtatcggggtgagcaacccaagtgttttggttgtcaccaaacgttactgtggctaaatcggacactcatctcgaggactcggagttcaaggcacacaagaaaacgcaaacttgttggttgcatttgacatggccagattaccgatctgggcttgacctgttcggcaaatgattaacgtgatccattcatgggcgagatatgtttaccatctgcatagaagataggcagcccgtcgacgttgttaccatatgcatataaactccacggaccatcggcctgtcgcttatccattggatgcgctgagccaagtgcaaaaatggcaagagccacagcaaagataatcgaaatcatgtgttgaaattgatgttacaaagttctggtttgataggtatgtcatgatcaagagttggacgcgtttgaaatcgtcctctatatatccattatctggagaggtaccctatcatttccccaaaacctcagtgggacaaactcagggttgacttgtaagctgagccatatatgggatcagtgtgtcagaacttctgtcttggataccccggaatccttggtcttgtcctcccatgctgcctaacccatatcttaagaacgctccttaattaaaaaccacctccaatgctgacctggctgaacagacactgcccatatgaggcgcatggtcgcaccgtacagtatcacatattgagttacatctatatccatgctcgagattggctcgccatcatccttggcccccttgtctctgagtaatacacgagggtcaggcccccactccgaattgcgcctatgtcactcgacctgactttttcactgcccggagagattaactgacacacaagttcagggaccctgcgtcaggagcctgaaaaggaaaagatccgatcacgataatgcatggcccacgtggatgtggtcctacagatcggggcggcacagaactgcttagcttacatggctagacaccataaaatcttttgacttcacaataatggtcgatgaaacagatgtctcgctattgatgatatgcccacttgaataatctatttggcacagatactaagtcttgccccatgttgaaaccgagctggagggccttgtctccctgatggcttggtacatcatttttttaggctattatttctatttttgtcagttggagatgacggtatgccagcatctcctagtaatgagcgtggcaatttacgaggtgtattgccttagggttagagtaggcgttcgtaaaagatcagcttgagtctctgagggaggtatataaattacgttaactatctttctaggaagcagatatcaatagtcttattttgagatcctgaggtccagtcatcatgagattttcatccattatattcttggcaaatttacttggtgttggcattgcctgtgccgattgctcctacaaaccatcaaccacactgcgaccaatagccacgagaacccgacttcgaaatacctataggcctaccggtactccatgtgcaggaaatgcccccaatgacagatctgtttggtgcaattacagcattgacacagactacgagaatgtcgtcccagacacaggtgttacgcgcgaatactggtttgaggtcaaagaagtcacactctctcccgatggattcatggctccacgtccggccatgaccatcaatggcacctttcctggcccgcctcttgttgcagactggggcgactgggtggtcgtccacgtctccaaccatctgtataaggcaatgaacggttcgagtattcactggcacggtattcgtcagaactacacaaatccgaatgatggcgttccttcgctcacccagtgtcctattgctcccggctcgactatgacgtataaatggcgagctggccagtatggatcctcgtggtatcactctcatatcggtttgcaagcctgggaaggtgtatatggtgctatcattatcaatggaccggcgactgcaaattatgatgtggacaagggcgcattgtttctgagtgattggacgcatgaaactgtggatcaactacaccaagatgtccaacttcgcggtcctgtcaggaagttgtcaaatggactcctcaatggcaagaatgtctatggaaacggtacaaatactaccgggtctccgttccacatgaaagtgcaaaaaggaaaatcttaccggttgcgacttgtgaaccctgccatcgacacccattggaagttcactattgacaaccacataatgactgttattgcaatggatctcgttcctataaagccattcgtcacaaacgtcgtcagcattggaatgggttcgtttcttggcatccctatcgctctaaacatacgaatccagctaattttatacatccaggccaacgctatgatgttatcatcacagccaaccaggaatccgtggccgagtccttctggatgagagctataccagccgatagatgctcccaaaatgagatggccggcaacatccgcggcatcgtctactacggcaacaggcccaagcaaccgcgcacgcagtcattccccttcacaaacgtatgcgaagacgagcttttgacgaatctcatacctcacgtccccaaaaacgtcgatctaccagtttcgccagtttgggataggaacgtgacggtcagcaataccaggaacgcacagaatttcttccgctggcagttcaattccacctcgatgaacgtgagctgggagaacccgaccctgatgcaagtctaccatagcgatccgggattttctacttcaagtggcgtgattgagttgcctttcaagaataaatgggtatatctcttcatccaaaacaccctcgttactcatcccattcaccttcacggccacgacttctccatcctagcgcaaggacagcctgggcctgggaagccacaatgggatggttctattattacgcagaatcccccacgtcgagatacggccgtgctagccggaggtgggtggctgttaatagctttcaagacgaataaccccggagcgtggttgatgcactgtcacattgggtggcatgtcgatgagggtcttgcattacagtttattgagcgacaagatgagatccgggatctcattgattatactccgtttaatgagaattgtgctgcgtgggataaatatgtcaagacgaagaatgttgtgcagcaagactcgggagtttgacaatgcggagtttgtgtgatgaactatacagtggataggatagagagagggttgtatgttagatatatgtatttcaattgagctggttgtaacgcctcatttttatcagattattttgatattctttcagggctgccgagattcttgtggctaggatttatacggaggaactggcagcaggagcaggagtaggagcaggaagaatgcccttttcaacatcctcttgtacgttcctcccgagtaaaagtaactcatcaatgcttttccctgaatcttttgcctccttgcgtaattttcgatagcggattcgccaggaaatatggctgatatatatccctgcctcgaaaacaaccaccaaaatatacataatccccccaagtatgtcaaatgaaccttgtgccgctataataaaaatgtgtaagctattttattatacgtattgctaggatgcagaccaggcctgacctaatgcgaagagagaaaacagcccacccaacgtgtcgatgcagaggaagacccaatctattaacatcagcaggtgtccatcaagcgctgtaaatcagaacaaaacccactgaagccaatcacacgcccgtctctcttccacaattcgaaatacggcggcactagtcctgcaatgaggataatggcggctataaccccaaccacgatgtcgggccatgtcaccccgttattatatggtatctgtcaagtttgattagatcttccatcagaaaaaaagaatagaaagaaacatggataatactctcaatgttaggatgagaagagcctccaatcccccaaataaaacaattgtgcctaagcataccagaacagccttagttttgctatagttgctattaaaattgatgagctgagattagcagttcgatcacaataaatccatacctgaaaccaactcactggttataatgaagaacttgactccaactaaccagcgaaaagaacccgaagatctgaggttgaatctgcaacgggatattgacttgctatagcaataatcataaagatagcggtcagcgatagatgcagatacaaaaaaacatcgaaattactagacaggaagtctgccaattagggtaattcaacttacctgcagaatcagatatgcgcccattggaaccgagcctacatgaatcacaaatgtaagccaattttgatctcgaaggtttcttttctttttcctcccttctccttcctatattaggcgacatgcttcatatatcaagagactcgaaatataatcctcgaggccctaaacctgatgaagggacagggaaataacttacagcttgcccacagaaacatcatcgctgcagggaatccatctgtgttcttacggcgccaattataccagatctgtggtatgagttggatgcaccagagaaccgtcccgatggtgccgaggacgtttgatgccagtgtgatattattctctgatgacattgtttgtgtataagaaacgacaaattagacaacaatatcacaatatatctaaaatgaaaatgcctggtatagcgtagatatccacaaaaacaactagattcgatgaggtgggctagtacttatactgagcagtcagcctaaagaaccaataactatcctggaaaatagcggaaatataatcggagatttaggacttttattacgaatcgttgagaggacccagtcccttttttatgcacatagtagcgcatgagcacagatcctctagtcgaaccagtcatggctcagggccaaatgcaagaatatgcaggcgagtatcgagataggagtgggttttgaggcctgttggtgaaatggacacacagaatgcagggtggtaagcacgagtgcagaataaaccaataccagactaaggaacgacaaggggaaaagggaaagcttgggagaacactatgcagcggtgaagtcttgacgtttgacaggctagtctagtcgatggatcttcgcgattagtgcatattggcctgtgacggagggggagatgttgcctagttacttgcctagttacttcgaaggcctggagtgagtatgataagaagaagcagaaaggatatgttgtcccgagatatatttctaccgattttgagcaaaaatttcgttcttagatataactctccccgcttttagtcaaggaagaactgcggagttgagtactagaacaagcctatcagattcgctcattatgggaagaggggcaaaattcaggctcatgagctaaaactagataggctaatcgatggagaatgagggctggatacgagatttagggctatatcatatagcgctgttcctttctggtgcattgcatttattgcacgtaactaacgttcaatgggggtaagcagaggaaagttactaatataagttatcagcattgaataaataattacacgctgaaaccgtttgaatattaatagaaacaataccttatgttgtatgcgccattctattctattgttcatcaattccccgacgcacacgtggctccagcccctcctatctgacagcgaacgcactctcagaaattgagcaactggtcttcattttctcgaataccacaggagtctagtcttgaaagttatgtactggcaatcccattagtcgctgggaaaatgaatgaggtattttgaagccagcgggggaggcctagattgctaatctgactctccgggctgcctgaattttaaataccgccttctttattaggtatagcaatatattctgccatagttcttgccggcgtcgaggtaaaagcggtacccgattaggaaggtggtcagaataagaggtccattcaatcttgttaacatgcactgtaatattgttactatactatttgataaattcaaattcgtgccaacaaattatgtgtctgagtcccattcactcctggttgcgacaccacctccagacacattcccagaacatcgcgcgtgtctctcggatcgataattccatcgtcaatcaacatcgagctagtagaatagcattctgcatctttcgccactctgtctctgaaactactcacctgtttcttgagcttttctggcgaaagagtcaggcctttggatttggcactggctatctgcacattttccataacaccagacagctgatctgggcccatcacactgcaacggccagtaggccatgaaaacaagaatcgggggctataggcacggccacacattgcatagttgccagctccgtatgaagcgcccaaaatgatcgagatatgaggcacggtggagcaactgaccgccgaaacgagttgtgcacccattttgatgattccagcgtgctcggccttagccccgaccataaagccagtgacattgtgaaggaaaattatgggagtatgtctggttttgtcagtatttggaactttgagtttcctgtctgaggcttactgttgattgcacatgcgaatgaactgagtggctttcgccgcctcattgggattgatgacggagagctggttggcaacgataccaacagggaagcctgaaaaaatcaaattagcgaacggactatcaacttcgatagtttgatcctacccataatatgagccgacgcagtaatcatattcgggccgtatttgggtttgaagactgagagacgggagtcatccacgatacgcaacaaaacttcacgcatatcaaatggctttcggatatcggggttcacgattgatagcacatcctcaatggggtatctcgggggcagtgacccaatcaacccgggcactgaggggacacgtgcttgaagggaagctacccactctcgtgatttgtgaatagcatcgaacctatatgcccgagttagtataagaatttgacaaaaaccagatccatcatactcatcagacgcaatttggtctgcaagaccggttgtgattgcgtgaactttggcaccgcccagctcttctgccccaatgacttcaccagtggccatcttcacgagcggaggtccaccaagaaaagcttgagcttggttctcgacaaaaatcgtatagtccgacaacgctggatggtacgctcctccggccgttgaggatccgaaaacaatagcacatgaaggctttccgtgtctagttcggagggcaagatcgcggaatagctgacctcctttatggaaaactttgaattgttgcggcaaaaacacgccggcctttttcaattagaaatgtgagtttcgaagggtgtgatcatgtgtaacttaccgattgaactaaggagatcagtggaaggtcgttctcaaatgcaatctccatcatgcggttgactttcagcactgttgctagtcagcaattgtattgagaatatatgttttgttgcttcatacctgtcatctcattccaagcccctccactttgggtcggaatatgagacataagaagacatatgcgtccacaaacatttccaatcccggcaatcagattgccacatggggtggaatcctcattgccaaacccggtaaatgctccaagttccaagaatggcgagtcttggtctagcaatagcgcgacacggtcccttgctaatggcacgttaaccgcgtttcttatataaacggagagtaaactcacgtagcagctgaccccggctgatgtgtcttcgtagagaaacatcatttccttcagcggaaacttgctttagagcttcctcaaatctgtcaagcacaggtgtccaactttctttgtttgcttggaactgcgaaccccgaagatcgatattggtgtttgccacaggaaacgacgattcggtcgccattgtgaaaaaagggtttagatctgcacacaatacgtatttttctcaaagtaaaatatatttcaagcagaatgtgccgcatcaagaatgtctaggccgagtttctaaggttgactcgagtggaggccgtcggtccgaaccccggaagtactaccgggagcggtgcggaccagctggtgatagtgtgggggaatgagatggaagatcattgaaattgtataatctggtaattacatttgtctgattggaagctgcctttgacatgttataatcaaccgcttgttcccaacctttgacaagtatacaccattcccttaatcaaaataccccaaatggattccaacctcgcacttgtctatggccctacagagccccagctatgtctcaagactatgggcgctctcatcgaggaccaggcagcccaatttggtgaccgtcctgccgttgtctttccatggcagtccgtccggctgtcatatcgccaactggcggaccggagcaaagccctagctggagagatgcttgaaatgggactgcaccatggggactgtgtgggtattttggcaggcaactgctaccaatatgttgaagttttccttgctggtgctcgaatcggatgtcctgttgttgtgctgaacaatacatacacgcctgcagagcttgaaaatgccgtcctaaggagttgtaagtctgctatgagggttttctttttaaaagggcaacagctaatatagtaacagcttgcaaggttgtcttccatgctaccagcatcggctctcgggacctgacaggtcatatcagaatacttcaagggacacaatatccaaatccagcactccccgatctccgccggattatctcactcggacttggagaattccgcactggagctattgaggttcagctctatgacacggttacttcgaatagtccttctgtgtctataaacaatgcgacactcgagcacgcagagagacaggttactccccaagatgtggttaacttgcaatttacttctggtaagtgacaacgaaaatccagatttcaaactgaatattcacatatttcaaggaaccacggggtctccgaaagctgctatgctcacacatacgtaagtccgtgaaattggtaactacttggagcatgtaaattaatctaacctataggaacctcatcaacaatgcacaatttgtcggaagagcaatgcaactgaccccggaagatgtgatttgttgcccgccacccatgttccattgctttggtctggtgttaggatttctttcatcatttttctacggaagttcaatcgtctttccatctgactattttgatgtcgcaaaggtagtcgacgccatcatcgacgaagacgccacggttcttctcggcgttccaaccatgtacgtggccgagttagaagtgatggcaaagacaggacagagaccccggcgactacggacaggacttgcatctggctcggcagtctcacaaaatctcatgaaccagctgcgagagattatgggcgttgagaaaatgctgattgcatacggaatgacagagaccagtcctgttagctttattacttccctggacgatagcgatgagaaaggtacaacaactgtcggtcgagtcattccgcatacggctgcaaaggtcattgatgaaaagggcaataccttggctcgagggcagcaaggagagctctgcacaagtggatttgtgctacaaaagggatactggaagaatgaagagaagaccaaggaagtgatgcgaagagacgaaaacggcgtcttatggatgcacactggagacgaagctatgattgattcggatggatatgcccatatcaccggtcggatcaaagatcttattattcgaggtacgttcaattctctgatacaaatccccaaacccgctcttactgatgtttgctgccaacaggtggagagaatatcttcccgcgagaaattgaagaacgattgatgtcccatgcatcagtttccgaggctagtgtagtcggtatcaaggatgagagatacggtgaggtcgttggctgtttcttgaaggcatcggtgcagtttcagaggcccagtatccaagagctccagcagtttgtcggagagaggctcggccgacacaaagcccccaaacatgtgttttggctaggagagaaaggtgttggtgatgacttcccgaagactggcagtggtaagcatcaaaaacacatgatgcgggacattggaaatcggttggtgggtatgttcaaggcgaaactttagtatagaacagataattacatttatttgcattactattttctgttgcggagctctatatggatatatatcccaatgacgaatgcggacgagaaagagcaattacctagtatcaggttggcacaaacatcaaaacagccctttttctctccgatttgaaactcccttgtctttgcaatgtcccttggtctccatttttgtccgaacaggtattgccacggaaatgtgtgatttacgtgcatcccgtccgagctggtccactcctcggtccgagatccggatactaaatttccccgcgtggagtgctttggagcggaccgaagcagaatcggaaaagaagtttagtaatatactctgattaactaactattctattgtatgataagcgatattgaagttcaacatcctaaaattgagatcaaaattcgacaatgggtccggctgttcgaatcgtcgaagtcggtccacgggacggccttcagaacatccgagacacaatacctacttcaattaagttggaattgattcaacggctccagaagacaggactacaagctattgagctgacgtcagtcgtctcaccgaaagccattcctcaactggcggattgtcgtcaggtcttgcgtaacccggacatcaagagactcttggatagctcgcaacttcggcttcctgttttggtccccaatgctaagggactcgagattgccatacagcacggcgttcgagagattgctgtgttcatcagttctacagagggatttagtaaagccaatatcaactgcactgttgcgcagggaattgaacgggctacccaagtggcatccctggctatacgttctcaaatcgccgtgagagggtaagaaaactggtcccattcccttatattacaatccaatggcaactaacctaaacagctatgtgtcctgcattttcgctgatccgtatgacggtccaactccattaccagcagtcctccgctgtgtaaaggccctcctagatgccggctgctacgaggttagcctcggggataccctaggcgttggctctccttcaaacgtgcgcgagctcatcaactacctgaccagcaacggtatcccgccagagaagctagcaggccacttccacgacacttatggacaagccgtagcaaacgcgtgggaagccttcaatagcggaatccgagtgttcgacagcagtgtcgccggtctgggtggatgtccatttgcaccaggagcaaaaggaaacgtcgcctccgaggacctggtttacatgttccacaatgcgggtatttcaacaggcatcgatctcccaaagctagtcgaaacgggtgtatggatatcgaaacaacttctgaagaacaactcaagtcgagccggaacggctctggcaaccaaattacagctggcagccccaagcacacaatccaaaccaagagctcccggcctcaaatgggacctttgcaacgaaacacagggtttacagatctaccgatcaggcgtgaacttgaaaatcgtcctcaacaggcccaagaacggaaacaccctgacagcaaccatgatctcggatttgacatcggtgatctcaaatgccagttctgatcccttaacctcccgaatcgtcattacagccaatggaaaattcttttgcacgggaatggacctcggcaagggaagcacagccgttggagaaggcggatcgagcagcgacgcacaattcacgggtttaacgcgactcttcgaggcaattgatcaatgtcctaaagtcaccattgcggcggtgaatgggcctgcgtttgggggtggagttggtttagctttctcgtgtgatatacggacatttacacaaggagcgaatgtcacgctgagcgaggtgaagctaggactttgtgcggcaacgatatccaaatatgttattcgagaattgggggttgcatttgcacgagaggtgatgctttctgcgagagcggttactcctggtgagttgaaggggttgggaattatttctgagattgcctcggaccaggagaatctgcgggttagagttgatgagcttttgattcgccttaaagctgcttcgcctaatgcttcgcggatgtcgaaggaattggttcgacttgcctgggcgcatggaggaggtgatgcacaagctgctgggattaaagggctatttaaagagatgatgcggtctgatgcagatggagcatatggcgtgaaggaattccaggcgaagaggaaggtagattgggatgcctatgttctagggccgaagcccaagctgtaaaggaccagattttttggttttagctagtatagacatttaaccaaggaatatggacaatatttgaactcttctacgagtcttctacaactcttctacggctgccgaaatccaccctcgaacgaatcagtagatggatcgaagccaaacccgttttgtggtagaggaagtgagtaaatctatggaactcctgaatttggatcgattactaatgaaaagaaagggattaactaattgactaattatagttctactatcatttttactatcttagagaagactgctcggttaccttactttctaggaaaaaaaaatatacgctaagtatgatagtagcattaataacgttaaagataatgtagcaacggcttccgatcgtagggaaaccaagaggagttaccgaagctatcaaaaaactgaaagcccacatggtagcagtggataccgcgttcactgcggcgcggatctgaagtagtaccatttccgcagcatagaggaatgttaggccgcaatagctaaccgtaaagatgaattgaaagcagtacaggaagaccacggccatggcaagagctccggtggtttggctgcagagggggaggtcgtgcctgcgaggcctgccatacagattgccatggccccagcactccacagcatgagagggcggcggccgagacgatcagtaatgaaataagcgatgtaaccaccgagggggagatagctgtcttcaaatcagagcaagaactccgtcacaaaattgaagttttgcagcccaataaccacgtctccctcccctggacccggaggacgatcctggattgcaacgaaggggaggaccatagggtccccatccataaaatttggcattcccgcaactgggtttggtgttatatccacagactgtgcacagtacggttgctgaagtcgtgccggctgtctgattagtggtggaatatttggagtttgtgcctggagggtccggatgtaatttcgagttagcgggcggggagcaccgtttggagccaactgccactgctcgaaggagacatagttttttctaacaatgataagaacgaccattctgacatcaccttcagaatctgcgaaccacttccgggcatcttgtcgaagtcgaccaagcgattctgatacacctgtttcgattataagtgttgggtagccgacgtttccaatcggatgagtacaacgagagagaggtacatatccattatccgcttctttgcccttcctcatccctgatcggtaagttgtcgatccgatccaagccgttccttcgctagggacacccatagccttgtaagaatcccgaatcacttcagtgaacttatcagtggcgacctcatgttcgctgcgggggacgaccttgatcaggccggtagagccctcccattgaaatcgaaatgcgattcccccaagaccgccgtggtcgcttgtaagtgcttcgattaccggtgttgatagaccgagcaccactatccattgatttccgtctgtatgttcctcgaaccatttggagatctggagtgcctctagacgcaggcgcctcagtcgtgaaaatgagaccacatgaccttgaggtaggtcagacatgagcgtggggttctctgccatcggaagtagaattctgtcagcatgtagattcagacgagggtttcgtcgacgagatatcacagattctactgaatcagtgtgtcaaggatctctgatgatgggtgacataatggaaataaagagggtgacgtaagttagttatggttaatgtaggtagaatattttcagacgcaaggttaaatccagaagaacgttttcaaggcggtattagcgattttgctctgctttgaaatatgatgagagtaagtcgttaggtaggagtagagaggagaacaagaagaatggaaggcagggacagcttcttatagttatctgttgtggtgctcacgtgccgatcacatgccaaatcaggcttcacatggctatttagttaactagatcttaatcattgtagagaatctatccttcttcatctctctctcgctccaagaggttataggccctctctccatcccatcagcattgtcctccctttgctaaaatttcatcaaaaaccatcaattttccatcaagctttgcatcaattttcatttctatcagttccagccaccaaagggcgctgtaactcgcttcataagcggtcgtccatagcttagacagctcgccttataagcggctgccctgaaaccttgggcggatttatactttccgccggtccggggtacccgaaagagccgtccccacaaactcttccccgcactggggagttcatccttcccaccttggaacttctcctgactcaaacccggccatggacatgatagattcaggtggtattaagcggatacgacaggcttgcgctaactgcaggtaaaattcctccgtcggctcttttttgccaatgctgatcacaaaccctctaggcgcaaaaagaccaaatgcacaggagaccgtcctatctgctcccactgtcgtcgtaatcatctagcctgtatctacgaaccatactcggccactctggcggaaaatccccctgcgcctaatccggtcatatcactgccgccagtcgagaataataataatgtcagttgggaattcctgggcactattgcattatattgatttagcagcagattgaacttttgcaaagaatcagcacaatcgagtcaaggcttgcggagctcagcggaaagacaactcagcagtacgatattcatgtcgattttagttaccaattcttgatactgattctaggggtttctaggaatgtaacgtctcgtttttcacacacacaaggccacgtacatttatcaccagaggttaataccttgtcacagcgagtgccgtcgccaccacctacctttcaagatcatgagttcgtgttctattttatacccctgaagaaatttggccctgtactaagcgtacggatagactcctccctccaccacacgtcctacgctcagtaatcgacacgtactttttacgcgtccacaaccaaccctactcttatttccatgaaccctcttttcgccagaagttagaaagcaactctttaccaaaatgtttgatcttggcagtgctttcatccgctgtacgattctcgacccacgaattctacgcgaatcagacgcgcgacgcatcgcaaaagtacgcgagagagtcatggctgtcagttctggcagaccatttgacgatggaagacagtctgaatgttcatgtggtacagacggtaaacttgcttgcagtggttgactatacaggtaagatggatggacactctaatttacttcctgctaacattgtgctatttcagccggtcgcgcccggtcgggatggctcaaaattggccttgcagcccggatatctcaagacttgaacctaatgtcggagcctgatcaatggctctcttattcagaacaagaagagcatcgacgggccttttggtcaatttacctccttgataaattgatctcctgtggccgatctcgaccgcttatcattctagatgaggattgcgaagttcaacttccatgcgacgagcacacttttcgacatggagaaaggagacagacgagtacaatcgatcagttgttgaactggaactcgaagtttgacgaaagccccagtccgttttcactcgttcttttgatggcgtcgatatttggccgatgcacacgatacgttcaccagagtaagaatatggacgagattccaccatgggatccaaagtcagagttctctgcaatcaattcctctttgctactcttagaatcatattctaagagtttaaactggcaactttcggatgtcctctacggaagcgttcaggtagatggaacagtcaaccgacaggagataggccagcttatatttgcccacactcttttccacctgtgtcactgcctgctaaaccatccgttcctcgtgagacgatggctcaaacctttcggggccaaggccccagctagtttttcctcccgcgcccttcaagatggatgcgaccatgcgaaacagcttatggatctcataaagcaggctacggaccatggctgccttgttgaatcctcattctatgcatattgcatagctgtagctggggggattcactctctagccgtacacttcaatcggaacaagggccgcgagtcggacagttcgcactacttgcaacagagcctagactctttggagagattagcaaagccttggacccacgcaggaaatatagtaagtttacctctgctcagtgaagaaatgtcgactactaacacgtttttgattcaggctatctcgctgcgagaattccattccatttctcatgctttcgctgtcctcctggacccacgtcacttaatggatgagttagactttgggtccgaagagatcatgtggtcgatgattgattatgcgataatgggcgctgatcccagcaaaaagcaactctcacccaaatccgcagcgaacataccgtctcccacatcgtgggttcttggcgccggaattctgggacagccgggatatgacagccccaatgggaatatctttgggggtctcaccccctcaatgcgacttgaggaagtcgaacaatttctgaactgtagcccgggaatgaggaacattatctaaattgaaaatgtgtcttcggacgggaatttgcgactttcgcgggctcggtccgtccggtccgatgacatattccacgcatatcgactaggatgaatggataataagtagattctcggagcaaagaaaaggaaggttgaacgaaatatcctcatggctcaacaacatcaagcgtcaccctgggagggtgtcatctcgggtacgacggcggccattctggctagtgtgattgtataccctcttgatatgtatgattatggaccaatagcatgctttcctgaataattctaagtctattctagtgttaaaacccagttacaagttcacgttcaacgacagaaacagcaagatgccaacgatcgagaaaaacaaaccgacacatcagaaaatcctacagcctacgctcatcatgacaacttcatcgatgcaatcagctacatacttcgcgaagaaggtattcttggtctatacagtggcttgggaagttcaatcctcggcacggcgtcaatgaactttgcctatttctactggtcaacaaccgcgcaaaggttacaacaatcagcatggcacaaatatggaatctccgacacaaacagtatcgccaaggagctgggtctaggcgcaattggtggtgcaatggctcaactatgcacaaacccaatcgcagtgatatctacacggcagcaaacccggaaagcaactgatcggcaacgatcaatgtgggagacaatggtggaaattatccagagtgaagatggctggaccggactttggagaggcttcaaggtcaacttgatccttgttatcaatcccatgattacatatggtgtttaccaatggttgaagggggttctacttggactgaagaagacaaagggacttggatctgctgatgctttctgtacgtcttttcgatatatttcccgggctgtctgctaacatgactactttattagtgctcggcgctttatcaaaagttctagcgaccatcaccacgcatccgctaatcgttgctaagacaatgctgcaatgcaaaccgccagattgtcggaatggtaaaccgttctcgggatttaccgaagttcttgtttatattgtcaagaatgaaggcctcctgagactatacaagggcttggcgccgcagattatcaagggctttttggtccaagggttgatgatgatgttgaaagaacggtatgcccagtactcttttcaatttcaatatcacacatctaatatcacatttttaggactgagattttgatcagaagagcaatactacttaatagaaagcagcggctggcttctctgaagtaaggaattaggggcttggggtcatcaactaggctagaatatcgttcattcgcagatccggagtcggtgggataatttattacattaagtcattttatttcctgcaattaattcttgctcaaagcattttgtctgctgtaatgcgtaactggcaaatgtgcctgcgggatttgccatagatggttttagactactcattccaggcctaacacttgttgaattctaaagaactctcacaaatactttgttatactagacttttgttacttcaaactattcattgcctatgtggtacttccagcggttcggcttaaatcgtgctttctcctcaacttatcagtttaacataacattgttcaaaattagaggtaaaaaagctagaacgagagcgacaatataccaatttaataatgtggtcatcttcactaaggaaatatcaaagggctcggaaggatagggatccccggtccttcaccccggtccggcattgtggagcgcggtccgatcccacggtggtggtggttattgttgtatactttgtcactattcttactagaacgcattaataactatcctttcctaatttcttattcgctcattactccaaaataccaattagtgataacattgctcgctcccgctccgagatatataacacaacatccaagttaccccagcattaagttacaatttcgtttgatctactctcttcgaagtcccattacctatttttataaagaatatggcttctttttccactatccccttcgccgatcctctctggctgaaccgcggttacagtccgtactacaatgactcgcatcgccgacttcaaaaagaggtccgcgagtatgtcgacacctacattgcgccattttgcgaggaatgggaaaagcaaggcgttgtaccacaggaggtatgtacaagactgtatcaaggacaaggagatgaatatccgctaaagatttcctgaaataataggttcataagcgtcacgcggagctcggatacactgctgtcagctccttcccacttgcggccaactatctcaatggtcagcggcttcctggggacatcaagcccggagactgggatggcttccacgacattgtcgtcatcgacgaattagcgcgctgtggatatctcgggattgtctgggcattgggatgtggtaactccattggagggccgccagtgatcaactttggcaatgatgatcaaaagaggagattcctcccggatatgttgaaaggaaacatcagattctgtttgggtgtgaccgaacctgacggtaggatttctgaaatatcggattgagtacattgactaattaaaagaacagctggatcggacgtcgctggaatcactaccacggcggagagaaatggagatgtttatattgtcaatggagcgaagaaatggatcacgaacggcattttcgcagactattgtactgctgccgtcagaacaggaggggagggaacccagggcatctccgccctgataatcccgctgaaggccccgggagtaacttgcaagaagattgaaaactccggcgtccatgcaagtggatcaacatacattgagttcgaccaggtagaggtgcctgtggccaatctgctcggtgtggagaacaagggtttccctgtcattatgaacagtatgtttcccctagatagccacggctagaccaaagccaattgtccctaactcttgacagacttcaaccatgagcgactctggctcgcatgcacatctctgcgcatggcgcgaatttgcgccgaggatgcataccaacacgccatcaaacgcgagacattcgggaagaagctaatcgaaaaccaactgattcgcgcgaagttcagtgcgatggcccgaggcattgactcggcatattcctggatggaacaactagtctatatttccgaaacagccaagaagcagggcgtggatgcttccatgggaggtctcttcgcaaatctgaaggtcttggctgggcagactctggaaaaggttaacagggaggcccagcaagtgatgggtggtcttggatattcgaaaaatggccgcggggcaaggatcgagcaggtcagccgtgatgtgcgggtgatggttgttggtggtggcagtgaagaaatactttcagaattggctcttaaccaggaagttaagagtatgaagaagttgagtaaactctagatattttgctatgttgtttttagttcaaatcgatctcacgtttgctcaaagtgactgaagaatcgttgcaaaagtacaagtcaagaatttcaaccttccagcctttcgatgacccttgggaatagggaattgttgctcgtggatgtgaatttacagtaccgccttcctgatcaggtatcatttataattctgctggagtttaatataaaggcggtatacaaattgggaggcggcggtaggtgctcaaccatattgggaaggcgataccgaagattcaggggggtggaagcaacaattccctacgaatatctccgagggttatactgcttgccttttgggatggaattgaacttgtattgatgaatatcgatcaatgaacatgctaaacaatcgaacaaagaatctttccttcctccaccgcatccccggtcttccaatctgtttgaaatttccctgaagccgcgactgaaatattgacttccatcttcatactctcaataaccataaccgaatcgccagacttgacttcgtctccattctttttcaagactgaaagaactttgcacggcatgggagctgcaacagtcttttgctctgaacccttatttgcctttgcagctgatcgattactctccgcaaatgagagcagagtatcacgtttgaattcaacatgagttccgatagaggggaaatgacaataaatccgttgaccacaatcgacttgtcccgcgaaggcatgggcccgtgttgaagggatagctacatgagcagtgagctttgatccattcactgaaatctcaatggtggatgtaagccaggaatcgggtagagctgggttgccgtgtgcagggacccatgagataacttggacttggtatgccggagaagacgttgctttgccggtgcgcagtgcttgactgatttcattatattgagcggagatttctgctgcggctgacacctcttcatcggtggtggtctttccattggggattgggaagagatatacatcctcaacgccggatgaaaccccggctgggcttgctttccaaatgcacatcacagcgttttcaggtgccgaatcaacctcctgtccagtctggctaggccaactgaccgtagttgtaacatcacaatggatattgactgggtcgaacctttggtttcggaattgcatgcggacattccggagaggtttgggtcgtgacaaggctgtggcgtaatctggaagtcgtcggactaccaagcttggaagaattgaggcgatggttttgaactcaggcagtccctggaccgaaggaggctgaagaagctcattcaggtgagatggaatgaacgcagttgtatagctaggatcacggaacgccgggttcaataaacatgatcgcatgaaaagttgatttgtcttgactccaacgcaagcggtctgcccaagaacctgagccattttctcaatagcaagcgctcttgttggagcccaaacgacaagcttggcgatcattgagtcgaaatagatagatactgatgaccccgtttggattgctgtttcatagcggatatcgcggcccggggctaaaggcccacttgctggtagccagaggtgaattttgccatgttctgggaagaattccctctcggggttctcagcacacagccggcactcgattgcatgtccattctgggtgacattccccagtgttggaaggcttttcaggctgcctccagctgcaacgaacagttgtaaagaaacaagatcaacccctgtgacttcttctgtgatcggatgctcaacttggagccgcgcattgacttctaggaagtagaattggttcgtcttgatatcgaccacaaactccaccgtaccagcattttcatatccaataagcttggctacccggacagcagtttcactcatcttttgtcgagttgcttctgtgaggaaagcacacggggtttcttcaatgaccttctgatgccttcgttgcacagagcaatccctatccaaaaatgaaaccacatgtccatgcgagtcacccatgatctgaatctcaacatgtttgctgctctcaatgaatttctccaagatacaatcatctgaaccaaatgaccgacgagcctcggattgagctctttccagttcaaccttaagctgtcccgcctcgcggacaatccgcataccctttccaccgccaccagcggaagccttgagcatgaccgggaatccaatctccgtagccactctacccaaagcctcggcatcttggctagatcccgagaatccagggattagggggacctcgggggcatgagcgcgcagataatcctttgatgaccgtttgtcgccgagagtagacatggcgctggggctggggccgatgaagatgagacctgcgtcatggacgcgctgggcaaaatctgcgttttcgctgagatagccatatcccgggtggatagcttgagcacacgttgaaagagctgtttgaactagtagttcgatgtcaagaaacgggttgcgagcactgcggtcaatgctgccaatgttgatggcttcatctgcgtcacggacatggagggaagatgcatctctgggtactcattttagcgattgtcctcgatgatatgttggtagcacaatttctgagcactcactcgtcgacatagaccgccacggatgtgatattcaatttccggcatgtctggataatgcgacaggcgatttccccgcggttggcaatcaagacttttcgtataataggtcttccatctttgcccaagggtggctctgcgacaaataatggcttgcgaagaactgacacatcagtgcccttcggatcttgggtgaaagtaacagccatagtgtgatcgcggtatgtcaagaatgggatttctgaaggttcaaaagaagcagataatcctataggaaataccagctccatcacttcacaatatcaagtgtccgagctcttgctccggactccacaacttcggtccgacatccgcatatgtgtgggggaagccgaacccggaccggtcaacccgcaccacaatctttgcttggccacgcgtaaataaggccaatcgttgcgaaagattgaagatcaaatgtcggggcttttaggatgccttagcaaggagaccgtgggaattaagaccatgcatgattccgatactcttaaaggtcgtccagtctatattaacgtattatagcggccaacagtcggatgcttgattttaatggttttatggcctaattgggactagctctgaccagttctagaccgcctttgacaccgctcaataccatcttttgtaagtagtccgtacgcatttaagagacgacgctgtcactatccatggggtaattcaaatgtcttctacccgctgcaggctgatggcacttcgccaagcggaaaccagaggatacagagagtttggaagttcatacggtcggtgggaagaaatccaggcttggttttctaaacgttttgggccttggtatcggttgcgctatcagcttttctccaggaaagtccgggactacggcgggtgtgcatggctttaaatgtgggagattcatatgattagaggattttaacgtctaggatcgatgaaaaatattatttgaggaggtataaatagcttcatcgtttcaactttcaagtcgttctcaaaaactttggtaggccaacctggaaataaacaatgatcgcgtctattgtccattgccgaaagtcctccgttcgagaatttgcttgcagagttcttttttaagagaaaatctaaaacaaaagaacactacaaaacgcgatagatccaaatcaagacatacagcgagcaatagaaacacggtcgaacaactcctcaaaggcgagagatattcagccagtcattagttctacgatttcagaccgagccgagcagacagtccgagaatcaggacaatatctctcatcggagagctttgacccagcggggaagcgttatttatttcgcatcttgcaaacgaacaaggatgtcgagcgtgtagtcgtcgagtggttcatagtaagctctatccctcctccatcataatcgtccaatctctgatatatgttagaatcgaaccaatattgagagagtggcaaaaaggtttcgacgaacagtttcccccgatccgagatcacacctctcacaatggttcttgatatccactacgcatatgccgcgccctggaatcatgagtcaagggatgtccccggatgaccgatctaacatcataatctggattgcattaggaaagcttggccttgataatggatattctcacatgatggagagtgggcaagacatgagtctggatgggcatgagaaggtatatttttctggtcaagccgggggccttgccgtgtttctattattaaatatgtgacagaatatgagcataattgaaatatgagttatcggcggggaatggcatcgtttcaggatctagctggggagctcgtaggttagatattgatctcctgctagatgacgaattcattggattgtctgccaatacgtctgtcataacggcgcgtccaatgcgcttctacgaaagttcagtccgcatcacacgtctttttcttgtagtctgttatttaaggaagacgatccccttgtccttttaatccttgaactcccaccattgtttgtttggctcattcgacaaacaacacacgtagtcttcgactctgaggattacagcgatcttgataccatcctcgacttctgactgccaagtaagagggaagacatgcggtattcaatggaaggatgaagaatatattgttcattgtgactgaaaagatgtgaactataagttgctcataactggaaagtagggtactactggatagtagaagtagcaaaagatttcattatctgttcctttattcgatagcgccttcaatcttagagatggggagttcaaaaaaaggtaaaaccgcaataacacttcatttcttattctcttgttatagcacatgaacatgggtgtactcttcgtcgtgatttaggccctaccattcaatgacccctcgggccaacttgtccttttcttgactgaaacgtagagattgagtggacggacaagttggaattcgggatcatattgaaccttatcttcgtcatcgagggcaaactcatagcgatatactaattcgctgaaaagaattttcgcctcgagaagagcaaagttgaaaccgatacagccacgtccccccatggcaaagggaagaaaagccgcacggtgacggcttttaaccttatcagtatcccaacggtctggttgaaattgggttggatcactccagtgttcggggttagagtggaggtcgtaaagagcgcaaacaactacactatccggttcgaggcaatagccgccaggcaaaatcacctccgtcttggttgttcgagcgggctgaaaagcaggattgtgaagacgtagagtctctttgacaaacttgtcaaggaacaataatttattcaccaaatccacgttccaatccgtgctcggtgtgacgcccatgtccactagctcctggagaagacggtcttgattgcactcgtaggtagtcaggcaaaagataagccacgacaaaagagaagccgtagttgagaatccagcggacgttaacatggagatgttagggacaatcatcgaacgtggaaatgtctcccccttctcatcggtggcgttgatcaaatactctaccaggctagatgcatttagagctgcattcgccatcggcattttttgcatcgctccatcggatttctcgattttagccacgatttcttcgactagtgtgtaacaaagtcgatgcgattctctcaattttcggggatcaccaaaaggcagatttcggtaccaagatccgcgagaggccacctttttgttgagcgcaaacatgttcaagatcgacatgacgattggatgaaaaggcgcgtcaatttcagccaggtggccgaattcctccccgagaatgaccttgcccacagtctcagaagcaagcttggtcatatactgatagacgttccacgattgcatgttttcggaaaatgtgtcaaacacagcgaatgaacgtcgaacagtctcctgcatcagcggcgcatagtgccgcaccgccttaggtcccatggaagttgggaggtatttgtgagtaagacgccacgtctctgtttcggtatcactgacaaatgtagcgatgttgtctttgacgccccgaaggggatggtcgtcggtgattcttttagtgaagtgcagcgattcgttgagcactatagctgctatttcaggatcatccgtgagataatttgtctttcccatgttggtagtcttgatcaatcctccgtatttgcgaaagaggcgaaaatgattaccaaggtgatctggaaagatttcatagaagctacccaccaagggaagacctttcggaccagaaggctctcgtacaccatggttgccgatcctgataccgataggctcatttgaatctagcacttcaccgatcttgctgatggggttattggacacgtggaaggagacccctgaacgaattagtgtttgttcatcgagacattatccacaatggatcctaccagctggttgaatgatatggaaggaccgagcaacgacggacttcaagccgttcaaatcaagttcctgggcaacttcaatagactgtgccgtcgacgggtcatccccgatcaggaaaaagcttctcgatgccatggtctagcccagtcgttggaatgataactggtaagaaagttcgtgtaaccaaatttagctgtttggggacaggatcatggccatatttataagcctagtcaaacctgaaatacattcatcagtaaccctgcggggtgcgtttagcggtaccattgtaacgaattggattttcggtcgagccttgtaacccgaggctcggataatacagtaattccattccatacacaatattgagggtcgtttcgagtccaaacatgagtaattcgagttagacttcggcaagaaataaaccccacttgcctctcagaccctcagggtgccccgcacgaccggccgccaccttcaccacccccacccttcctgatcctctgagtaaagcacgtgaaattatactttcggataatcactgcatgtattcggtccccacgtatctacaagacgtggctcttagtgaagcatgcttcatggctggcagtaaataccttgcaggcgtgtaatgaggagtttttcgactgaacgttggacgaaacggcactggtaggttcactgaataaacatgggtattttccgtgtatgtgggggacaacaataggtataaagaggtcgtttcatcgctataattcctcgtgtacgaatttaaatcatctcgcccaagtccctgaacttggacttttttatatccgatctcccctggccttgtttgtccttcttcttcctaatggcccaatcgcgcgtgccaccgactcctcaaatggagttgcccagcatacctgcaaacgaagtccggttgcatcgcaaaacgtctgatgcgtggatgattgtgcacaacaagggttagtctccgggtagttgttgaatatattggtgaattatcatcacaggactgacgtaagattagtttacgatgtcaccgactacatggaggatcacccaggaggtgttgaaattctatttggggaagccggaaaagatgctacacaagtgttcgaagatgttggccattcagacgaagctagagagctcctacaaagcttgttgattggcgagatcccggcatctgtgggtttctccattcattcatccacattatggcaaaaggtactgatttgtctgttcaaggaacgcgtggccgaagtggagatctatcgaccgactttcgaggtgatcaatcagactacagccattaagacaaagtctcaaccaagcaatggtttggcaagtttttggtgggctgtcgctaaagtctgtctgatcggtgcctctggcgaagttgcacgcttgatttatcattatcgcaagcaatggccaggattcatacaagcttcgctgggaggcctgcgcgtatccggaaccaagatttggatttcaattggcatggtgtccacggctcagtttcttttgaccttcggactactttcctggggtgtctcgaagcttgatttcaagcaggatatgctttcatttccagcgtacagacgtcgacacccaaacacgttctttaaaccttccgccacccccacttcatttacatgccagcttcatcctcagacttggacgaacctcacactccgtgaaaaagctagaatctcgatgaacgtttatcgatttgtattcaacctgccgaatacaaaacagcctctcggcttaccatccggacaacacgttgcagtccgtgcaaaaactggaaataaagatgtcgttcgatcgtataccccaatctcagacgatcgagaaattggccacgttgaccttttgatcaaagtttatcctacgggtaccatgaccaagtatctggagagccttgaagagggagactgtgttgaattccgaggcccaaaaggcgccatgcggtataccagcgattattcagaaaaaattgtaatgatcgctggtgggactggaatcacccctatgtatcaaatcatccgtgccatctgcctaaatccgtccgatgcaactcaggtcaatcttctttatgccaacaactccgaaacagacatgcttcttcgagagcaaattgattcacttgcgtctcggtttcctcagaatttaaaggctcactacattctagtgaacccgccttctgggtggcagggtagtgtcggtttcatcacggaagatctggtcaagaagagtgtggtagcgtcatctcaaagctctcgcgtaatgctgtgtggcccacctcccatgctcgctgcggtgaagaaaattctatctgcccttgacttccacgaccccaagcctgtgtctcagatggaagatgaagtctttgtattttagactcgagatctactagcttcgagtttcccacgaaaagcatcagttccgtggatgtcaaggaaatttactactagtcgaatttgatcaaacgtttccagatacctgacttgcatacatacttcggcaatattgccgcgattggttgtttcttcgtgaagcgatgatgaagatagaaaagataaagcagaaaatgcgctcccctccatattgagtgaagtcgagatatcagatgcctacaatttatcgacagttggcgttacttaaggagtctgctcatgaataatagtaactgcatatttctttgcggtatcttggtattttgcaggaaatcgtaattgtaaagattattgtcgtttaactctcaccaacaaacgttgttcacagcaagttgaacaattggaaataaaaaagccccgcatgttgggcacccgccacattggggttgtccgccaccaatcccccgcaatccccttctattcagcttcgtttaatagcagtatttatatataacatcgcattacacaagctctaatgcttctatttggatggtactctgctcagcgaattctccggaaggatgagaatcaagcgttttcgctcgacctggggagttgatcccggccagaacctggatcactgggccaaatggttccctgaactccagaaaaagggttacagtatgtttaaggcgtatttctcgttcaacagagtgacagattgtcactgacaccatgcctacgtcctcaggcggggttgaagtaaaagttcttctgctacaccccgagatggatttcaagcgactgaggcaaatctgtgatcaattgggatttgaaattgctgtgatgtatgtgatctaagttctcaagtggataccctcgctgatatatatgaatcagagcgcaaacgtctttaccctccattcttggtccgcgcccgtcaagactgaacgcggacaaccatctgcagagatatcgagagataattagtttggtcaaccctctgaatcctgcagccattacatttcagtctggacagtaagaggctctcggctctcaaggacaatcaaaagcttattttctttctagggatgattgggatatcaaggaatcgatcaagtattttcagaggacaattgatatagacgaagagttgggggtttcagggcgcgtctaccacgagactcatcgaagtcggtcactttgtgcaccgtgggtcactcagtgtatcttacaggctgttccccggtatgctttccctgcactcagaatgacgtgaactgacctgctcatctacgctacagactgaggctcactgccgacttctcccactgggttgttgtcagtgaaagattgttagattccgccgatgacgaccgagccatggttgaagctatcatcccacatgtaagttcagggtcacgcgattaacgggaaactgacaccatcaggtgtaccatatccacacaagaattggcacaacacaagcctcccagtgtccagagcctatgcatccaagttttgagcaagagagactctcattcgaaagattatggaagagcatcctgagcaatcacttcaaaagacatggccacgacgcaaccattacatttgtaccggaatacgggtaaatcgtatttatgtctatgaagagaagacacaagccagctaattctaacacagcccattcccttatcaacccattggaagtccgaaggcctacggagaggtcgcggacgaggaaggacaacgtctgcaggctttattcgacgagtttgcggccactctggtcgctacttgaactcttagctttaagtcgcccattgcataagagataatgccatttcagcctgcaagaggtagaatatttttcgtgctagtcaatattgttggatatggtggccttaaggccgcgccctctcggtacagactagattgtcagaaaccaagatggatactatttctgtacagatgactattgttattttaattgaagatctttctgccatacaattcgaccaatacactcgcattaccacgatattccgtcttagatagctaggcagcagccctacgtaggactacttcaagtcttcatgtactatgtatataatgaaatggatagagatattcacccttttcgtcctcacgccattccaagcgatcgtatccgctctccgcagatggttggtcgagtttttactttcaaatcccttttgtgatttatggcatcttactgctaaagtggtgattcgaacgttcgctaccatcagtcctccagggttcggtgaggggctgggttaattgggatgtggcggtttgcgcgcccttggtgggacccaaagctaatctattgtggtggcatagcatctttgagctaaccctgaatcgatgttatatgccttacaaaaggtaagcaaacgagttacttccatctagggaattcccatattttgagcaaggtaaaatactacattcatgtaatcgtacccgaggcttgccctattgagctggacaccaagtaaaagccactcttgaactactccaatttatgacttgtaaggtacatgaatgggttgcagattttcattctactgtatcactttagggggtggggaattgatctgagttgtttaccccagattgtaaaatgcggggtttccccacaagaacttcttcgcgaacacacggacaactacaaaattaagttcaatctagaaccagggctgctgattgtatgtgagaggtgaattgctaccaggataatgtaaaatcatatataggcttgttgccccggtttacaccctactgtacttggacatctttgatacgtgttttcatcctaaagaatcacatcttgaacatttctatggccagtgaaaccaaaatgagcagtgacccagacgcgaatgacaacgtcgacatgatcgagcatgtccgcacgaatgccagcatcgccattcctcttgaggtttttgagaggcgataccttagcctcaatattccaaatgcaaactggtataagcgtctcggtaacccaacacctctgtgagttttggggtctctgattgttttttctcgagctcctatctgatagtgatatagcggacttgttggatttttaatggcagcgagccctttcgcatgtgctctcttgggctggggcggagcaggaggcggaggtgttgcgactatgtaagcgagaccaaagagtgaattcctgatgattatttcaatctgactggctctaacagaggattctcgtatttctttggcggcgtacttcaacttatcgcggcagttctcgagtttatcctgggaagcacttttccttccgtcgtatttggctcttttggtaagttacacggagatcatcacagaggtacttgaaaaaaattgacatgtcattatcaggggcattctgggtggctctcggcgccacacaaacccctaatttcaacgcccaggcttttttcgaaaatggtgaaaatgatgtggatatgagcgaatattacgctagctttggtaggtgttacccagtggaatggacggtaggtcgaattgaccatggctaatttactccagcatttgggctgatcttcctggctgtcctcgtttccatatacacgatttgcgcaacccgccttaacatcgtctttttttgtctttctttcaccctcaccttttctgtgatatgtcttgccgcgtcatactggtgtatggcacaggggaaggctttagctggagaacggctgacaaaggtatttgcatcccgaaagagacccgagattccttgatcttttgaacatctactaatgaaacgtccttcgcgatcaggccggaggttccttgctgttcatagtttgtttcctagcgtggtactatctggtttacttgatgctagattgtgtcaattttcctttgaatgtcccagtgggtgatctgaccagagtatatggtagagacaaggctaggaaccgtgagtgtgaggggatggattttccttgaaagaaaagtgtggatctaaaagatagacacttgtctttcttagaaaggccacttgatgaaataaccttttttggcttgaaagatacagggaaacgatcttgactgcaactgcctcatattgggaatgttgaaactagctggaaacaaagaagggagagaagtgctcttcaacgtcattcgccgttactcagaaacccaaggccggaaaatatattatagattgattcacaatatatgacttggttttttctgcttttatattttgtgtcactatctgacaattcgaatttagtatcacgggaaaaacttgcgactcactaataccgtttcactctctcacgtttgctctttctacaagatatgtgcttttcattgtatccatttcggaaatataccaggggattcaatacatggtcgaatgtacttcccgatacgaagttgcctgatggaagcagctggtggaaaattggaaaccagagatctagcaaatgagacagttttccatgattaaggaatagcggttattgtgtgacaattgagccatcttcagatctccgcaggttatggtgactgcaacagaggcactattgcaaaatctccgtcacggatcctgtaactaaaatacccaatgaggctcggacgtgaaagaacttcctagacttattatatgacttcaattattagacctatgagaggcttagaaagaataagcacattttggcccgaaactgctgctacgaagccctgatcgaggttttcagcctgagaataattaacaatattaaccagaaagattataacaaagataccaagatctgcgatttctacttgttggaagcagcaaaaagaatgatatctcaacacaaaatgttgaatcctattttcgtcaaagctcactccggaatggctccgtgtacattttaccggtgatcatcaaaacccccattagggtgaatgaggactttagtgtatccgctttccttcttgtcgaatttttcataagccatcgccgcatcagcgaaatcgatttcatgcgagatgacgaagctgggtttggccttgccggcaattatgatgtctcgcaaataccgattataggccttgacgttacactggcctgttctgagagacaaaccctatgagaaatcagtaacttggatctctcaaccaagggcaatgaccgaccttttcaaatagcttgccaaaactaaggctgattataccatttgcggaattggcgtcagatgatcctggatcgctaaagaaaggtagttgatgtgagacggtgctatcaaaatcctcctcgtggcctcttgcccatctccggattcttaccttgggacatagagcccaggaacacccattcctccacaggctcgtgtgacacgtatcatgttctcgaggacaatatttgctttttcggaggatccattggagtcgacagcctggtacccaactgcatcgactgaccggtcgaccataccattattatgactggtaatctgatcaactgcatctcccttggtaaaatcgatagggatacagcctatactttgggcgacctgaagacgctcttccacgcgatctacaacatagacttgagacgcccctcgcaagactgccgaataagcggccatcaacccaacgggccctgcaccgaaaataacaatgctttcgcctggtacaaatccagaaatttcgactccgtgccagcctagtattgtcagtccttaaacaagcttttgtgaagcagaaaacaaaaagcgaagcggggggtggggggtgggatagagctcaccggtagggaagatatctgtatttgtgtgtcagctatcgtttctcccataaatgtaaaatggccaaattacctgcaagtagtatgaaatctgcttcgtgttctttacccgggggtaacagaagggcattgaagtccgcgaaagggacacgaagatactgcgcttgaccttcatcatgacattagagttaagactcctggcctctgcgtcaatttttctgaacttacctccacgataagggcccattgcaacgtatcctgccttcgaggtcagccaagtaggtgatgtattcaattcttatattttaccgtatgcgcccccggcgaacccgggattgactccagtacaaaaggctgtttttccttcctcgcaattgcgacaccgtccatcggcaacgttgaaaggcatgacgacacgatcccctttcttcagaagcgttactcctgagcccaactcctgtacgattcccatgttctcgtggccttctaatattagcgcttcttctctactgctataccatcagatcttaccgaatgtgattcctggtttggcagcagttctgccctcatacatactggaggtgttagaattgagcagcatttcacagcatcttaggtcaactggtacacttactgcagatctgagccgcaaattgccgccttaatctctattagcgattttgatcttctgaaccaatgcgatataataactcacagacgtaattttgacaatgatgtcatctggatgttccagtcttggcttttcaacatcttggacttggacgtcgtaaggcccgacgtagttcaatgccttcatagtagtcacttgcatcgtgttggaagtagtggggccaccgtagtagaaattagatctcgaaaatgagattttaaacttcaaacaaagacatcgggcggcttttattacatcaactgaagacaatcgaggggtagaagtcaatagtccaggtggatgggcattctaactgaccccacatgggttttacgacaagaatgtatatccgtgaggggtagtcctatcaaacccaccccacccccacccccacaccaagtaaggtcatcgagttgctgtgaaatgggtactgaagcaagagctgggattatcggcttagaatgccgaaagattctggcctaggacaactattgaaggaagttggatatcgatttcggaagtcgtaatggaatgattcggtctaacattctatgccttcttccaacatcagtatgttgacgatcctacgctatccataggtgcattggacccgtcttgtagcatgtgtattatggctatattattatagattttttggggttatgacctagtattatagacacaggtctaacactaataaataaatagtgcgtattttgtacggaaagaacagctctcaccgaagctcaatcgtcaccttgccgtggaatggcaagaactagttctcttccagaagatcagcatatgccctcaagcttgcactgacaacatcgacgattccccagcatagattgccactgaagcttctcgtccagactcgaatgattgaacagctcagttgcctcatatttctcgggtcttttatcaattccagtcgattttctatagggagtttgattcccaggtcagtctcatcaagcaatcgtgtgatccatagatacagctttctctcgtgacttggcaatcttaccagtcccatattagggagggcccgaagccacgttgtcaaaagatgagcgtattcaagagcgctgagacagtgctgtacgctccagtgaaatgaataagttcttgctacgaagccaattccaagctgtatgggaatcgacaaagcatgaactgcatggagaagtgctgtgataaatccaggaccacgcacaacatcattgggtgcaccagccagggcctgtgcgattgctgaaggatccctcgtcatcaaagcacggtggggtccaagatcaatttgcagtcgcacatagatttgtcccagaagtgccgctgaagtgaatgcaatgggaccggagggattgcgtgggtcggtgctggactccggtgtctgcttccaataggacttccatgtccgaagcacggcatccattccggttatgtgatgccgatgagtcccctgctccagtggaagccgacataactgacgagcaaagaaaagttgctgggacaaggcatgtaagagaatatgatttccaaaagcagtgcaagccatttcaccaccggctgagctttctttcgccttaaagagcaaagaaatcgattcttggaaacatgaatgctttctattttgggccttttcgtacaccagtccccacgcacttgcactttgcgctgtccagacttcggctgagcagggcatattgagccccagatcagaattgagaatcaacgggggtgtgttatgcataagggagtggaggttgagaaaacagaaaacgacgaatttcgttcgcctgttagattcttctttggcccaacgacaccagtcaacatcatttgtgcgatcggtgatttcgaaggccggtttttccccaagcccatggacacggacgagcgatgcaagattaccttgcagagtcatcgattcttgtgccgccctagcatcgcctccccaggttgcatggatgaccagcagtagaattgcctgcatagcctccatcagctcggcagactcttgctcagagcgatcgggagaatgcgaccaaaatccggctaccccacggcaagtggaaagcaacgagctcgatagaaggtttggtgacgtaccataacttctttgtctcaggatctccaagattattgcttgtgctgcacaaaacaaagtcaacccttcttcgccctcaaagcggtactgtgccccacaggcagcaatggcaagcacaagcgctggattgcaacttccaatccgcagcgtcggggtatgaataaagggaaggtgctcgttgaggccatcgataaaaccatgaaaaaaccgagataatttgaactttgaaggggcagagaaatctccaggcaaaacgcactggaaatagttcagcccttttagaaaagaccgataatcagcctcgcggatattccgagtgagctgaattccgatggccccacctgacctttgggatctgtcttcttgctcgcccgattctggctgcaaggacggtagacgggacccgaaattagataagaagttctcttcggggacatgtccgtgtgatgaatgatcctctacatcatctgtagtggttgtgtcatttcgaaattccgtttgtaacgcagccacagggtcaaatggcaaaataaattgatcaattgattgaagtccatcgggtgcccacccttctgaaaagccgatactttcaatgaaatcggcaaaattttgcattggatcttcgattggtttcattattggacaaggtatcgactcctagacatactcataatcagcatgttttgtcactcttctgatatattttcagagcctgacctcatcaaaagaatcgagcctttgtacgttggaatttgcttcagtaggatgctcccaatccctttcacgtatttggagtgattgctccacccaaggcaacatgttttggctgtgaatagcagctattgagtgctcagctggaattggcataacatcaagtggggtttgtcttcgatccgccagcccctcattttgtccatgtacaagaagaggtggtggtgggtgtacaagtcttttatggcggatcatcaggtcactaaacacaattagaacctgcttggaagggcaataggcttaattgaacgaactttctgccaaacgatttcgaacatatgtcacatgagaacggcttgtcattggtgtctgtggtgtgagtgtcagcaatgattcaacctgtgttggcgaagtgaacggcatacgacttctgacgtgccgctgcaggtgttcggcgcgagaaaaagaacgctgacaatatgggcacaggggcggcttagcacggcccttcttgattctcttgggatctttttggcccggcatgacggtggattccatgatatgaagaccgcggctgagccagaagggtagggtccgagtctcaggaaacgtagttatgaggggcagtggggacaatttcgggagataatcggtaagggctgcccaggtggtgaccccgcattgaccgcctcccgaggttggttcggggccttgagaatcgtagcacgccaactgaacgtctgctccacgaagagacaggggtcagaggaacaaaaagtcgcgactatccgtaggaaagatgtaagaacttgatatcacctgccacagggcttcgaacaagatattgttcgcgaataataaatggcgttactagcaacgactggatggagacgaacagtgcatagaacattgacacatatttcatccccggtggaaatcgagcatttattcccggtcggatcaaatactgtttcaagttcagtgggccaagttacgcaggacactgcctgatcatccagcctggctggtatccacctagcgtgtaactcgctttggagaggagacatcgatactgccatcgccagtggaactaatgttctgactaacccggatttcacttctggacttggccggggtcacttcctttcgcgaactagaaattgcaaaacatttgacgatgacgccgatggaaattgccgtggcgagggtattggaatagtcatcattaagcgccttgacgacgccatcgccgacaaggaccctattctcggtgtcatcctcagcgcttccacaaacccagtcggagtctattacccggcctcactccggggcccagcgcgcaatcttcaagaaaatcttgaaccaagccgctgtggatccatatagcgttagctatgtagaaatgcatggagcttaactcacctcaacctgcattcatgaaacaatacttactatgatacagaggtactctagcgggtgatgccggtggaatgatcagtgtcttggatacttccgccccgacgctctcggaggtctccaagggccggacggaggagcaagctctctatttgggctcagcaaaggcaaacatcggccacggtggggcgtcctccggtgtctcggccctgataaaagtgcgtctgatgatacagaagatcatgattgtccctcactgtaggatcaagaccaaaaccaattccaagttcctgactgatctaggagagcgaaatgtcaatatcgctctgaagccaacggtgtgggagagaagtaccgacccttccagacctcgccgcgtcttcgtgaacaacttcagcgcggctgttggcaactcagtactcttgattgaagacgcaccagtccagaagtagctgccccttattcatattgatcccaaaactgtgtatcttatcgctgtgtcgcctaaagctggaaattctctctagggcaatctgcgctctctctttggtcacttgaggtagaaccctgaagtctctttggtaagctttcatacactactacaacccgtcggatatattataaacattgttttatacttactagctcaaatataactgatatctatacccagatcgacaatatactataggatactctgggaataacccggctaaagaatgccccgaaggtagtattcaccttaagtggccaaaggaatattcatgcattggtcgtacacttagtactatcattaaagggaaatgtataatatcaagtaggccgggtaaagttttattagtattgtattgtcccacttcggctgccgtactcaccccaagttactccgtacaacataaaattttagaaattaagcttaatgtgacgatctgccgacttatgccgactgactggtgcacctgcccaaccttgaaccgcgacctcgcacttaacattgcggtcgttcctttctaaaccgtaaatgaggtcggagtttgcatggcttatggcaaggtcgctaggaagagcacaaaacccagtcgaggagatcgtagattttctctttccctcctttatacttataatttggaattgattgtactcttttcttctggaaagaactagcatgtaacacttaaggagacacaaggacacttgatcttgatatattgtcagaatctgggattaataccagaatgaataccggcatttttcatcatagatacagatgggtcacgtggttgaccaggctagtctctcgttatcggcagggcagtcttcctctccactctagcttcttgtttcgtcaccggcaacaataccgtctaattgctcgcgctgcatgatggaatctgcgcctctggcgtacgtgccggtgtcagagcgaagcctctcccgtattgctcctcaaattcgcgagtcatctcaccttctgccataccgcctttgtctagagcggaaccctcttttgacatgggtatttcgtccctcggccgactggaatgaatagccgtaaggtctcgtgacaactgctggattgattcgttgctcatatagcctcccacttgcctgcttctccaaccaaggccccggttctttccgtgaagaacttgaccatttgcggagaccataaattggagagcatctccagtgccgtgattttcgatgatactgacgttctcctttaagtgatcatccgcccgtgagcaaatttcgaggcactgccgagtagtttcccactcgtcgcgcaaccttgatagatcttgagcatcctcgtcagaggatattgctgtccttgattttgcgactagtcgatccataatagctcgcatatgcttttccaacttgtttgccgtcatagccaagctatttttgcattcttggagaccttcatttgtgaccgttgccggtgacgcttcagatccggctgatcccagagatggacccgcatcgtcggacatcagttgaatttgatcgatatggttcgacagctgagcgcaaatctgaagacacttctccgtactcaagcgctcctctcttaacgaatgtaattcagccgcatcaggcccagactgagtcacatcgttcttagccagctcttccaacttcctatcaatactctcaagccgagctcccagatcatctttcgcatcttggatgaggctctcgtagtccccaatattttcaacagcaccagcggataagcgcctcgtaagaattagctacttgcgtaaatggaagctcagaaatgaggggggcgacgctgtaatagctcaaggtgacactcacaggtttacatcggttaaggcaatattgatagtggctttatatcccgccagcaagtcgcggaaatcgacaatgttgttacccatgtatgtcagcctggcccagtcccggaagctcgtgccggtactgtctgatcgcgatgcgcatttaagaatctcctgctggaactcttggcaaacattaccgcatcgcaatagtggcaggtctaggcacgagagatcgacactaaagttcgatttcaccaggtcgacgaggggagccagcacagcactgagggcttccagctcggcgagaaggtcgcgcacccgctttggatgcgatcggaagccgttcactgtttcatagagtgagacactacaacgaaaggcaaatgtcgccaaagcaaggaccccggaggccagcccgatcgcttcagccatattggaatgaaggacgtagagaagttttcaggggttttcaaagcttaggtggcacacttatacttatatatagaaatgagcacaatgtagcgtcaagttgtaggcgccaggtttatcttgcaatcgttgctctgaggtgagggggcggggcagcggctactcgaacagtgaggcgggcgaagcagaattacgtaatagtgactaggtgccttccatgactagttacacgttaactagttactcggttgtccaaaattagattatggattcggcccatgcagctccgtaacctgtttccacaagacctccatgacacgtcaccaagtatgccacggtgtctcggggtttcattggatttaaaggactcgctctgtgactcggactgccggctgtccttcctagacaggcgttaaatgctgtgaagctagtcctcatgtaaatataaagaaataaggcacggccagctctcagtctggcgatgtgggtccagggtcggaaagcttgcctcagccaaaagatttaggcccgttgacttcgggccaagtacccatagtaatccacataacacacaactttattcccagatcaagataatcgaagtttatcaagaaactcaataagatcgattgtgaacagcctcttttctgtgattcggtcgatgtgagacgtgggaaaatacaggatatagttagggttacctcccattaaacttgtacagtggctactttccgcctgctgcactcaggagggattcgcctttcatatatattcctgagactctgtcacagcttagtcatagttagctagttagcacccccaacaaggggttcataatatcatcatcttccccaccaagcttacttgccacatttatggtagcacgtcctggtttcatccagagttttttttcttccgagaggatctctctcgggtttgttttaacaagttcgaccacctcaggggttcccctatatgccaaggtcagaggtcaccaagcctggcacgatcggcggtcgcccacgctgtcgatcacagtgccaagccgctacggtaaggctgtcgatcacagtgccgagccgctactataacaatccatggacaagcgtactcgtcgggccacccagcttgcaatccagttcgacaattatcgccaggaggcacgcccctggttaggtaatttcgatatagatatactttccttattattatcttaatccctttacctaccgggcctactaatcccttaaccttactatctacttctattatccttctatctttagaggatctatttctaccttcctagcctatcgacaggtctatactcaataaggccgttaaggatttcctctatctaacgtcttacctcgccgttctaagtcctataacccctctatcaagtgagcctgcgtatccgctcgggagaccccgacctaagcgaactataagtaagcctcctagttcaccggcttctataccttaatcttcgacatctgtatcagactaaccgactgcctaacctactgctataatatacctttctataccctagtctttaacgcctatttcagactaaccgactgcctaagctactgctattatatactacgcgtataggcccgctactatatgatagcaacctcgttttagtccccggccaaacagttataatagtaagtttttccaaactgaggacgaaaattctgtaccataggctaaggacagccacatagaccttctataggataactaagtggaagtctagtcttcggaagactaataagccaaagtcgactaagtagaagtctagtctccggaagaccaataagccaaagtcgactaagcggaagtctaatctctagataactaataagtagaagacaactaagcggaagtctaatctctaggaaccgaataagctaaagacaaccaagcagacctccactcttataaggctagtattaagtacctaaccctagaacgacccccagtatagttaagagtacgattaactttacatttttacaatagtaaggctagccctatagtaggtctatcgagcctactataggaagctaaactctctaatctcctataaaaaatagtaaataacggaggtctaggtcctagctataataatagaaattagggtcccggctatataggcgatatattaactctagctacttccctactattacctagtttcgatatagtatagtttatagagcttatcgagaaagctatacagataagccttcggaataatactaatactctttataggccttaaggtaactaaggtccctagggcgagtaaggttccctaggctaattagttactaccgataccttatagaaagtatctaaaattggtgtttttaatcctttaaagagttttaaggatagaatagatatagtttaaaatctttatatctactccgatatatatacgtttatagattatataatagacctaatactcctaaagttagaagctattatctaagcgaatatctatagctacctataaggtaatgcgctccgatagtattcgtaggagttaactatagataaaaaacgccttataaactaggttctactctaagatagatggttttctataatatcgcagcgttttagacctaattataccgaggcccttctctagcttaataagtatatatataaataggataatgtatactaaggctgtaccctaagagaatatatatagggtatattatacctatataaagctataggtataatagatattcttaactagttattataaattcgctagaacctagagcctatactttattacaatatcctagagctaactaagactaccttattagttacttttataaatagccttaactactactattaagactagaaagatatagtaattaagtgctagagttagttaactactaggtttagaaataataggccacaataggataatttagccctatattactaataagactagcgctaaggctacccttagcgcctatatagctataaccgcttactagcctaagactattaaggtctaccttaaagctaggccagatatagataataataggctctagcgccctatagctaggcttagtagactccttagtacctatactaagctataggagcctaatattagtcctattagtattagccctagaacctagtataaagtaactaaggcctctaaaccttttagagataataatatttatagtagggagtttaagcttagtagacctagaataatcctagctactaatagtctagctgtaatagctctaggaactcctagtatactatttagaataaaccttagtagatatactatatagatatagatactaactattattagttaaataactacttctaagctaataacaatagcctaaaggaatattaggataatgtcctagttaataacgataattaataggatttcgaagacaacttttacactaataaggacctatatagtataaatttcgctaaccctactagcctataggataataactactaatctagtttttaagcctaggccaatctaccggtataggcctagttatatatagtcgatagtaagtactcagttacttatttatcctatttataggtttttaagttaaatactaagctgtattagtatcttaacggctgtaagccttaaactactaccgctatactagctaaagctatcgctaatttcgcaaatcctgcttattatattatctactcagctagatagaccgactatatccctagctatatatttcgatcctagtaatatataatagctatagttagacttagaagccctagtaagctaaatacttattaccttaactctagatatattataactttaatcgatttaaagctagcagtattactctaatacccctagtatcctattagcctaattcctataagtaggatcggttcctaatacctatctaaccgctatattattatttaagtttacttcctaaataaagatatagccgcagagctataaatcgaggcctatattatcgaagacctctatacctagcttcttattaatatagatattctaggactagaggggtttatactcaatttcctatattcctaaataattattaagtcctataaaaacctgacttttcctattaccctttatataaaactatactatataagtaaaagaccggtctatatttcttctaaaattgaggtccccctacgctaggcggcacagatccctattattataaagtcgattttactaaaggattataactttatttttaagctaggtaatagtaagtttaagattctagtatagatagttaacactggttttatatatatatatactgttaataataccgaccgaatataagtcattaggaagaaggattgtataggctaacttttagagctagactttatatctacctactaggtttctactaaggtaatacctctagtattatagccctaagcggttaagtcctaccccctattaattaattaagatatttataactctattactgtctacctagctactattaataacttaccccagctactagatagacttcctaatagacttcctaatactatttttatactagatatatagaaagtcctactaatatctatagcctatacttagctaagatatctactagaaatagtactacctaatagtattataatctataggatacctaaaatagctgtagtactctgcaatatttataagtaatataatatttagtctaaccctagcgttatagatatcctataagataaatagataagactcctaatagtccctagtttaaagctgtaatatttataagtctatagataggtaagagaaagctaataagttatcgataatatatttaatactctatatacttaaggaaagatattatttactaaatactaagcctaaggtataaaccctatttttattatatagaaataggttacttatatagataataagggtaacgctaagctctaataggttagttatattatagtcgataaccgcctaataaataaaaacttagttctagacctatacctattactacgataagacgagattattactttagtaaaaggtaagtattttattataattatagatatagtaaaattcttctattaatagtatatctatcccgactattatagctactaagctattatattataccgcggttaagaaattctctatattattactataggtaatttaaactctattgcctatatataatactagatagataatatattccgtatattttaagaatagtattaaacctatatcgataatatctttgtggttagtaatatacttaataagtatattactaaactctacctactatttataaaactagaggaatttaatattactctaaacctaaagaaagtatatattaggtttctaagtttaaccctattaggtaaggatattaactccacaggtatattaataaccgctaagaaggtaaaggtaataaccttactagtttttctatatatatataagtaactagaaatataccttaaaataataggtaatcttcgctattatattaaaagctatatatagaaatcggaactactctaagtctataagataaacttactaaaagagagcctaattaaaggcccctagcgctaagtatagagtatataagctattcttaataaaccctcctaggctaagcttaagagtttttatctactctaggctaagttttataaacctaaatagctagtatactataatcctatatactagctctatattaataccaatagtttaaaggaaatagggcacagtactataatctattatataaagataacatttacttataaggatgttttaaagctaccccctattatagagatctagccgattatattccttagccgacttcttatagatatagagaagaattattagcctactaagcttaaggtttctaccctctactagaccctctataaggtatatcacttagtagagacctatcctagcgaccttctagctatagtatatactaactatagtagtattataggtattactaaagtaataaacttaagttctatttctttagaatactaaaatcttcgcctagtctatatatcctagtttatttaatagttttacctatatatcttctatagactaggaaaaactaataagatcgctaacactctttcctatctactatatatagacctattagtccctagtatataagataatcttaaggatatcctagcactattcctataagtaggatcggttcctaatacctatctaaccgctatattattatttaagtttacttcctaaataaagatatagccgcagagctataaatcgaggcctatattatcgaagacctctatacctagcttcttattaatatagatattctaggactagaggggtttatactcaatttcctatattcctaaataattattaagtcctataaaaacctgacttttcctattaccctttatataaaactatactatataagtaaaagaccggtctatatttcttctaaaattgaggtccccctacgctaggcggcacagatccctattattataaagtcgattttactaaaggattataactttatttttaagctaggtaatagtaagtttaagattctagtatagatagttaacgctggttttgtatatatatatactgttaataataccgaccgaatataagttattaggaagaaggattgtataggccaacttttagagctagactttatatctacctactaagtttctactgaagtgatacctctggtatcgtagccctaagcggtcgagctctgcctcctattgattaatcgagatgtttataactctattactacctatctagctgctattaataacttatcctagttactagatagacttcctaatagacttcctaatactatttttatactggatatatagaaggtcctgctaatatctatagtctatacttagctgggatatctattagaaatagtactacctaatagtattataatctataggacgcctaaaatagctgtagtattccgcgatatttgtaagtaatataacatttggtctaaccccggcgttatagatatcctataagacgaatagataagactcctaatagtccctagtttaaagctatagtatttataagtctatagataggtaagagaaagctaataagttattaacgatatattcgatactctatatacttaaggaaagatatcgtttactaaatactaagcctagggtataaaccctatttttattatatagaaatgggtcacttatacagacgataagggtaacgctaagctctaataggtcggtcgcgctatagttaataaccgcccgataaataagaacttagttctagacctatacctattactacgataagacgagattattactttagtaaaaggtaagtattttattataattatagatatagtaaaattcttctattaatagtatatctatcccgactattatagctactaagctattatattataccgcggttaagaaattctctatattattactataggtaatttaaactctattgcctatatataatactagatagataatatattccgtatattttaagaatagtattaaacctatatcgataatatctttgtggttagtaatatacttaataagtatattactaaactctacctactatttataaaactagaggaatttaatattactctaaacctaaagaaagtatatattaggtttctaagtttaaccctattaggtaaggatattaactccacaggtatattaataaccgctaagaaggtaaaggtaataaccttactagtttttctatatatatataagtaactagaaatataccttaaaataataggtaatcttcgctattatattaaaagctatatatagaaatcggaactactctaagtctataagataaacttactaaaagggagcctaattaaaggcccctagcgctaagtatagagtatataagctattcttaataaaccctcctaggctaagcttaagagtttttatctactctaggctaagttttataaacctaaatagctagtatactataatcctatatactagctctatattaataccaatagtttaaaggaaatagggcacagtactataatctattatataaagataacatttacttataaggatgttttaaagctaccccctattatagagatttagccgattatattccttagccgacttcttatagatatagagaagaattactagcctactaagctcaaggtttctaccctctgctagaccctctgtaaggtatactacttagtagaggcctattttagcgaccttccggctatagtatataccgactatagtagtactataggtattactaaaacgataaacttaagttctatttctttagaatactaaaatctttacctagtctatatatcctagtttatctaatagtttcgcctatatatcttctatagactaggaaaaactaataagatcgctaacgctctttcctacctactatatatagacccgtcagttcctagtatataagataatctcgaggatatcctagcgctatatatatttaaataacctatagtagactaacctatagtatacctccttatagtatcggtactctagctaagcgacaatactaaggattgtatcttataaggataccagttagatactcactagttagccctaatcgatactctagaaagtattaacgcctagtaggatccctaagttaagaagttaccctactacctagagaatagcttgattattttcacaaattctaatagcgaggagagtctatatctaccccaatctataacttaggaaattttcaacttagtttataataagtagatatactagggtttcgacagagcttagtataagcttcgtggtatcatattctacaaaggtgctaagctcctaaagcagtacattaaacattgccctatctatttagagcataggatccgccgttatcgcccatacggttctctctaactaatcatcgccctaccgatacccttttatactatttgttagagggcggtaaaactaggcacaatgcttcgtcttatgctctcgaggggtcaaatgcttagtnnnnnnnnnnnnnnnnnnnatataatatagatagggtatcctaactagtaatagtattattaactagtcgtctattattaattaagagcgatcctatgattatatagaatagggcttaagccctattatctattatcttaaattgtttatagtcgattttatattcttatcttaattcttactagagagttagttaatagttatttagattaactattgctttaccctaggtaaaagtcttagcaaagataggataaataggtttatttagtattagaagggttattatttcttctaggttaacgtattcctatagtctatagctaatagcaattaatctgatatatatatactagactaactaattagattactaacttaagataattataggtttcgcttctgttatagtagcaaaatcggatagaagagagattagatgaaacaaagatcagatgaaaagtcgtcaatattggtcttaactctcagataaaagggttaggccgggcttataactgttggagggcggtaaaactaggcacaatgctttgtcttatactctcgaggggtcaaatgcttagtgtttaaatagataaacaactaggcggtcaaaaacatgagatcaaagtgtatatttaggtctaaaatagtcaatttgtctgatctggtattctatacaatctggggctttcttatacaaacattgcggatagctcggtaagtactgagatcagattgatcttataactaactagatgatttcatgatttttcgatcagatgaaatcatgactttcatcagatgaattcatgactttcatcagatgatttcatgactttgatcagatgaaatgaaataggataaatagtgcaaagtaagcaaacaatcgaatgaagaacacatattccaacactattactttagatctaatcgtcgcaatgcctatttcgactaatagatataacgcggctataactataactgataagtttactaagttaataggaatgatacctggctgcgtagactaggacggtaaagattaggcactgggtgctctctctttctggtagatagctaattaggggattcctacagtgattattagtgatcgcgaccctaagtttatatagggcctctagaaagcacttttcgaccttatctatactaagttgttttttactactgcctattacctataaactaatagtcagttagaacgtactaactagatagccgaagttactatatagtacgcaatcgctacttaccctaacgaagattagctaaacctattacctgccctctaagctatactaaatagctcagttagtataacaataggttacttaccttataaactcttatatagtatcgaactacactacccttagtcgcttttacactaagctatagctcctaatattattatatatatagataccgagtattctactacttaggctactatatatataaaacgctaatataaccgctattataggtagattttttttaatatcggtaataaagtctatcttaagctaggatatagatataatatactattaaactaagttttactaaggtaactacaatagcgttatatcaggtatttcgaagtactcgaatatattaggaaacttacttatcgtttaaatatcctaactaagttaagaatctacctagttattagtattatatacctagaacccgtcctagatagtaacaatccctaggagcgctaactagataataaatactacctaactatagataagcgtttccctaaagatattatctataaggtcgactatattcttactaagtatattattaatatacctagttaaccctattataatagtactaggtattaaatcactaagtatctaatctactagaaaggctaatcagctagggataactattaggtataggaagaggactgtattagatataataaggctattaaagactttaaggaacattagggcgtactcctagtaagctcctaagtactatattttccttactttatttttactttccttttacttttattactatctattcttactaccttatattacttaactcttacttctaactcctacttttattctaatttaagtttctaactcttatttaactcttacttactactcgatatacctattctatttttcctacctctattacttctttttttatattaaccattctctttcttatatactagacttattataccgaaaagaaaggcactcctataccttagtctattatagggagcgactgatatactttaccttctgggatatatattcaacaattcctatataatataatcttataataccgcttatactaaactagaactagataggctaatctagactagtaactaggtcccagttattataggtagtagactatctctataagatatcgcttagttacccttatatataagatacaagtataatctaaaaggaaggctagtactacctaataaccgtaacattctatctagaatatatattcaacaattcctatataatataatcttataataccgcttatactaaactagaactagataggctaatctagactagtaactaggtcccagttattataggtagtagactatctctataagatatcgcttagttacccttatatataagatataagtataatctaaaaggaaggctagtactacctaataaccgtaacattctactaagtaataagcttatttatatagtaataaaagaactgtcttagaagaagtatactaagttctatactatctaggatactaatagtaaactatatactagtagaatactatagaaccctagcctataaattaacttctatagactcttatatatactaatctagaaacgttactatatattcgttagcctttatatagccgcaaaatatagctacctaatagtcctaaaggtagatttaaagcttaaaatcgaaaacctagtttttacaattagacctattatcctaggttatcctttcgcagaggatatagttactaacctagtagcagtattctaagcctactatactaaagaataagccgaatttctatactcccgttctatggtatactaattatataactactacagtcagtatactatactctagaaagctgaaataaacttaaagatactagatatcggcttagataattaccactatatcgctatactcctataaggactaagaccctcctatagttttttctaggaattctctatatagtctcctttatacttagctaaagtactatcttttactttctcctaaatagacctaaaaaagataaagattatagacccagtttaatacttatactagaatataaattatctaacttagtctagtcatagtacttagtaagaatactagcccactatataggactaacctagcgacataattagcgttagctcttccgttccgttctctttaccggatattcctaaaccttaaagctaattaccagctatataaagccaactgtactaagctaatactaaggaaaagatcctccgcaatttcatccttccctataaaggtataatagagtatatagactaggtacagccagagatcgagaatttaaaaaggttacgcaaacatatagctagatattactagctacaactctaagaggccgctctaaccgagaaaaccaaggctgttactactagtacccttataataatctcgaacacacttagtagcttcccggatattcagtactaagctatcaggcgctaggaaaacctcttctactgcccctactaacttcaacaaagcgctactcctgacgaccaagcctaaccagagagcccgatactgctagacaataaagaacgtaaagcggctaccgagggtccaccgtacgaccccaggcgtgaattcacaccctcggacatctacactccgccccgggcctgcgataactgacggcgcttttcgttttctcatcattttttcttttttattcttattttttattgaaatttccttttttctcagccggaggccgagattttttgagacccggcatattgttacagcttagtcatagttagctagttagcacccctaacaaggggttcataatatcatcatcttccccaccaagcttacttgccacagactccgagagaaaaagcccttagaatgcgctttcaagtgactagttttgacaagaccgaagaaaccatgactaggatggcaggcggaactctattactcctaagacacccagataacgaccggtacataactcccgggggtggaatggaactggaataaatcgagagaaacataatcaaactcctaacactagaacaacatgttaggcatttccagcctactgacccttagggggaatcatagcaaagttctggtctccgtttgcctcaaagtagtgtccatctgaaatcctttgcgagccattagcgtatacgttatattgtcgaccatttctgccatattgagaagcatcgcgaggtttgtcggctggtggttgcttggagtgatgtctctggttcatttccaggtctctattccaccgacgtagctctccacttacagccacaaacccaggatcttcaacaccgacaaacttcggcatatccatatggtttctatgtataccaatgaagatttgaccgggcaagatggccgaatattgtggcacgacctatttcttaggtgtcagcaatgaaaatggagcctgaatattttgtctagcttacaaaaccaacacctagcacgggtaactcttcgtaaaagcaagtgacctcaatcggtggtgtttctgctgtgctgtgtgccttgatcatcgtgtgaaagccatcttggatccgcgcaagaacctcagaatcgcgcttgaggacatccacaattttggaattcgtctgcttaaggaggccaatggaccgagacacgacctcagccaatttggcaaatgaagccccatggtgtggcgttccaaggaagatgataccacgggtacaatcgaggatgttgtggagatgtggttccggtcgttgcctcgactgaaacaaggcctaccatttgcattagtatcatttcgtcagtgtcttccactcatgtaatgcgatatcgtacatctttgcagactagtccacccaagctatggcagacaaaaatgacaggtcgttcattctatttgtatcaacaatcagcagtactagtggatcctagaattggttgtcttaccgtgtcgctgctatctcgatacgatgaaagagatgtcagcagattcagggcatgattgcagatgaagttctctgagactgggcctcgccaatcgaccaaaaacgcgtcataaccgaatgtgaggacacgagctgttgggagtatggatggcaagagactttcgggccagggtgtagttgcaccttcggcagtccatgtagcttcacgatcaccagtcaagccatgaataaacacgatgctatgagaacattagaaaggtttccacaacgaataaggcacgcactcaattgtcccatcatctgggttacagagcgttttgattccgttggggaaggacttcttcggctgaatctcaggagtagaattaggagctgaacccggttgtcgtcgcccaaaaattcgcttggccctagtatagttgaaaaatgtcatcttagatcgttatagaaaggattcctggtcgtgcggtttgcgatataagactgaaaggatggcggtgcatcggcgagattgcattatagggccaattttcattccaacctaatggcatctgctagtgtattgcggtcaatctaagcgccaggaatatctattttcgcctgaaactcacgacgtgggtcctttcttatctcgtcacatcgtgaagacatggtgtgcttatatttgctctcaattactgctggggagatggagacaggctgtaagaaatcagaaagccaccgcagctcgtcgatcctctcccccaggacaaacgtaatactatcaaagatgtactcctgtctgcccagaatgttggatcaggctacagaagcacggagcgggttagaatgagccacagcttagtggctttcaaatccgatttggcgccgctagtgatgaaacgcatttgatgccatcattgcccagcggttacaggatagcgttgaatggttctgctcaggcgcatgttttgcaggtatttgatccaactttagattcaaatccggctgagaaaaatggagtttctttacatgattggattcgcttattatcccccaacgtgctaggcagggtaaatcagagattgtgtcgcactgggggctggatacgatttctataattagcaacatgcatggctgggggtttggagtgtactcgcgctacgacctgcatcaaagaaaatctaatctgctttgtcgatccgatttgtcaatccattcagaattgttccaccctcgtacttgtcttcatatccgatccatcaactgtgatccaggcccagattcgttgtcacattagccgcccagaaaaggggctgtgccgacgtatcagaattgaaaaaaagcattcataatatggtgccaagtgccagccagtcaaccatatggaagtgtctatcaaaataccttcatgattggcgttataaggaagctagcactgtacgtacgcgccggggtcgacggattaggttattgtgttgcgtcgtcgtcatttcccgcaggtgggggccgcacggaccatgattctgccactgcacaccgtggacccagggaatcataaattcagcgcggtgaccactgttttaatcctagacaaagaaatctacactctctggcgggttgggtgaatgctcttctcaataacagaccgccagctctacgcccagcgctttgccttgcctttgacgaagaatcacaatcagtgaagcaaaaggattcggcgcatcagcaatgtaagaattaaatacttctgattctttaaacttccataataaccattcacctagtatcttggtcagaatgtcagatattgagatcattcgccaaattactgacctcattggggtcacagaaagtataatggtggcattcggctctatcaaagacctctctagcttaccggaggcctttcaggaagccatgagatggcttcctcttgttgaaaacaccttgcgacatgccaaacgcgcggcggagaaattgaactctaccgaagatgcccgggcactgaagaccgtcctgcatgattgcgacaagaaagccgataatatactggagatttttgagcaacttggtgaaaagtcaaacggagaatacaactcgtccgtgtaccgctgtatagttatcaagcagggaaaacagcgtgtggagactttgatggacggcattctggaggacctaggaaccttggttactcacaaggcgtttctaggagaaatgcacaatcaaatcaaccttttggcgaaggctcgcgaatatctggcgggaatttgtccctcgctggccgattcggatcttgccgatcagcccagggctgccaaccaatacggcgagaacagtcgccagtacaacttgttcggtgaaggcacacagagaattgctgatggccactatttcgaggcgaaggggaatcaaaattttggtatatttccttccaaggagtctgtggagaccagatagcggttatactgggcggcggtgtcggtgtttcttgaggtgtgagatatcctacaatataatgttcgcccggttaatgaacaatattaaacttatgttccttaagtacggaggcctatggccgccatgggtgacttgtttactattggtcaatattacctggcaggaatatagtcatacactcaacttgcttcttctttctctccatcttagttattttgaatagaatgcactctgcttcctttgcaagatctggcacgtcaaaataacaacttttttttatatacttacgtttttatcccggacgacttcacttttacacgcagagcgtcgcgaaattacaaccgagatttgactggacctcataattatcccgaagacagcaattagtaagtaagtatttacccaggtatccaatttgctctggaaaaacattggcacattcaagatagctgagaatagtaaaatccttaaatgcatcaagatagatattaaaaacaaaggaaacacgttcaaaccccctccccgtcaggcacgaaatcgagttagatcattcttccttcaattgtctggattgagctctcgtacaatgatctgggcccgttcgaggatgtccttcgtcctctcgaatcgggattcgagcgcatttgctacggcgggcgccttttctgcctctgaaagttggccttcatccgcaatgacagcgttgaaatccctcgccatactctctacctcctcagtcacttttgtctgcagatcatcgaaacaagcgtcaagagctcctatgtattctctgcctgcgagtctagagatattggcaaagagcatcgaatgcgtcaagtggtcattcataattttcttccggcgcttctcgcttccagtccctatgtagatcaataaactggttgagcttggaaataaaaattactgagttgacaaacctccttcttgattgatcctggcatatgcaggctgcatcagacctgaaatatacgagctggcatggccataaatagtgtctcgctttatgtttctagaattgtagttagaattttggctgggtatagccatattgggacatacatactctgcacattgtatgaccttgagcaaagtattcgaaatatgatgtccgatgcactgttgtctgaacttcatgctttgttgaaggttggcaagggcgcatggtgcaagctgaatatgggctgcagaatttagttacatgagcatgctggtgcaacacggagatctggggaaatacagtctttatcccacataggaatgacatacctccaaattgcaggcaccatttatcgaaaatagtgtcagtatatctcgcaaggcttccttcctggaggtgcagcgaagtctgaatattctcccatttgagagttagctgctcccgtgaaggctggagtaagtcgtcattccaacatcgaccattaggtacagctccggtcgtatggtctccgtaatgactacaaaaggctgaataagtgctatgggaccactgggaataaattaggataagttgtgtagtgagaaaatcttggacaaaaactcactcctgcccattctagactgatctgaatactttcagccgtccagcgactttgatattgccctgcgcatttcttagaaccgtaaattaagttactgtatgaatcaactcacgaattatgttggtgatgcattcgtcataaagaccaatcaagctgcggcgcgtaatttgagccagtccctggtcggaaatgagttcctatcgaccatcagaaattccacacatgctaagagcattctcagagacccaatatgcccttttggatcaaaaatacccgatgaaaactattctgtgcattttccagaacccgtcgaaggagggcagcgtttccacctgtgactggatctactccagacaatgcccattggcgcagagaggaaagcaaagctggcacttcgtgattcaaaaatgcggatgttgaccgcattagagctgcagcgggcactaattggcagtagcgacgcagctcccggattcctgcgagatcaacgtatgcctcctcatcactctttccgctaaagcggtattcggagtagagtatgttactgacacaaaacacttcgacatcttggtgcctctggatgagctcatgtgatattagagagtttcgccgattgatgaggaattgactcatgctgcccaatgagttagtatgcagatactgacgcgaatgtcagatgtcagatgtatgttacttacttgaacttcagcactttttcctggcccctactacacattcagcgagtgaggttgtttcatcttgaggcagtgaccttaccgaagctccattgctttgaccgccagttccgatcgtctcgcaggagaggctttccgtgccttggactcggttgattcaagctttttccggaggacctgcatttccttattcatctctttcactcgatgagcatatggagtatctccgcgagaagactcctcaggtgaaatatcctaaaaatacaggtcagtgagcacctcccgctccgacgggccgctgtcattacctctgactttgtgcagatgatcctccgcggctgatcatctctacatcttcgcataatgtcttgaaccgacgcgtttgtacaagcacgggaaatatccataacaacaaagacctcgtcacagctatgagaaagatagcgctctgtggctcgaaccctggcaaaattcagatcgctgaaacctggtagaaattagtctgcgacccaattccattggaaatgacaaaatgagattcagtacataccaggtagatcagctagcaccaagccgtttctcaaaataggtgatttgagatataccctgcaggagtattagtaaaacaacctggttctcgggaagtcccacgaaccttatcaacttgatgaatggccaaattgcaggattaccattaccagcattactggccgttagcatatcaagaatgtccctgcactcctcaatatcaccggcaactacagaatactcaagtgcatccagtccgccaggtcgcagtgctaagctggcagaggcccatcgttccaactgtgaaagaagaactaaataggcatcttcgaagtcttgagaaagatgctccatagttaatcctggttgcttgttgaacaaggactgaaaagttccccaggctctcccggcctgatctcgacatttttgctgctcttcttgtgacttcagttcttggaagaatcgagtgacatggaattgacggaagatcgtaagaagctctcctaatagccctttcatttcttctgaagtcatgaaatctgcttcgatcgtaaaaggtccggtgtggttttcatcaacatgtcggaattcagtcacaacacaggtgcaagctgtgccttcgcggctctatacatgcattttagtaaaacctcgttaattagcgaagatgccaatgattaagacagaacatactgagcgtgacaagctctcttgatcaagtaaagagtttatcagtgagcttttcccttttcgagtgttaggactagaagtgacagaagacaaaagataacgacgaaaacccataccaacaccagagtcgccgatgaaacccacggtccgagtttccggatattcaaacatgctcattttcttagtccgcttgtacaggacatgtagatcggaagaatgatcttggtttagctcggagagtcccatgatatcagcgagcgcagccaattcacacttaacttctttcagaccatcctggacccgacgagaataaattggggcagtaggaagtggctcttcgcgaacaccagcagacttggcctcggtcatttcttcaacgtcactacagtgatcactgtctgattcttcatcatcttgtacccgatcgctttcggtgggtggagcggcctggccagtactcgaggtagggaaagccccagggatccgtggggttgctcgggttgaacttgaagatatcgaggaagtcttctcgtgctgttgactgccattaattgtacgtacaagctcaggccttggactcggacttggagaagcattatgctgctgtgcataattggaatgcgagctacccggccttagccaagcatttgatgaccaagttggaggggaatgcatgggggctagggaatcgttgagacccaagttcccaaagataggaaccaatctcggagtttgtggagttaatgcaggaccccccgagcgattggtgtctcgagatgatgaaggggtgaaagctacttcagattgcgaatgaactgagaaggtgaactctgaagatggcacttccgtcatggtgtgtctgcgttttgacagttatcgaaaagcctgggtcaggggcggatggggtatatataaggagatcaatatggcctggtatggtaatcaatcccgaacctataacaaatccgctgtgggcctttgtatcgcgccttcatgctcctacttgcgctatattagcgctgcgtttcaaccacctttttagcgcctgcaagccactatggctgctcgtctagaattttgatgattctattctgactccagagaactatggctttgtccacagcttcgtgcatggtacgtgttatccacaaccttttgcgtgatacgttttatcttgaatgttgaatgagcagagaactgttgcaacttctagccccgaacgtccttttggcccccattagttagcgggcttagctgcattccaacccctgtaccaaaaaacgcacggagtcatgcgcaggaggcgagcatccaattagatttggagtccagaaaatttcgtccttttgttatcaagggcgttgcaaccctttcgaaaagcggcaaccacggagcactagcacactcacccatttctcacccgggcgacgcccaccggactatgaccgcatataagccacacgccggtgagttagtagctgagtgggtgaccaccagcgaaccagcgaatcctcaatattgtatattttttgacttctatttttattgttcggatcttaggaaaagatctcgtgccgccgactcttcacccccttcagcctattcacctgaatgctctgaacaccactattcaagacctggatatcctacacgctgggatgttgatgtttacaatgttcgccaaagtggccagctatacaaacaggctgtctgtattacactaatagctcagggggagctaaagatgatgtattaatactaactccggcagtgccttggggccgctgccatagagctgcatgataaggatgactcaaggtcatcaagtagtacggagatactataagaaaaaaaaaaaaacagtatgtgaagtctcaaagtgggagatttcttcagttctttgatctggatttatcttacggtcttagtacccctctcctaaaattttgagaaactctactagagcttaacaggcactaatcattatatggagacacagtgagttggtgacataccaccaaattcgattttaccgttgccattgttgtcgaatgcctggatatgctccgcagcctcctcgtcattcatttcaatgccttgctgcctagaagtgtcgataagctcgtctgtggtaatgaagacttaaacttgagcaccttggcaaaaggctatcagtgagagacgcacggtcattattgacatactagagtgcagaaagtaagcatcggcgcgcataatatctattgggaaggcctgtaagcagaataggcaaagaagaggatgctttctgttctattccgctggaactcccccccttaggcatgtaattgatagatataatcgcaaattcttcgagctccgacaaatatatattgatcagatctcacatacaatcaaatatttacattcatacaatatcatttggggggatgcgaaggcagctaatctactcgttgatgccaatgaagatatatacctgattgattttgggaggttatactgaaggttgggttgagaaggagaagtctaagtcgaccaagggagatctctagggacctgaaaatatcaggcggtacctttttagatgaatattacataactactatcgttccgtgctcatactatctactgttagttattacactttcttatccaggctaaggcagcctgctaagacgacttcctttactttatttatacattgatctgtgattagtttgcaatgcttgatgctctataaattcactatgtttgtatcttgattctgtatacgttgcctacttaatgccagaggcataatcctggtcagcctgaggtaatccgatcatatcgccctacgaaggtgtaaccgctatttttcatcgatcttaggcgttaaggccctccaaacatacgagtctccagcatttgaagccactcacactcgccacagtcctgtactttcccggagaaaagctgaccaaggcccaaaacgtttgaaaagccaagcctggatttcaacataaagcccccattcctaccgactgtatgaacttcaaacaaactctccgtatcctctggctccagcgtggggagatgggaatagtgacagcctcatctcttcaatgcgtacttgcgaaagatagcattgagcggtgtcgaaggcggtctaaaactagtaagagctagtcctaattaggctgtaaagccattaaaatcaggcaccggactgttgtcggagaacgcagggtcggcataccagagaataccggaggatctattaatcctaaaaatgtatcattttcccggacgtttgttatttttagagagttagagaatttattgacatttttctgccacatatacaattgccttaccactcgaatttccatcagatgcttatacttaaaattccagtaccgcctgtctagatcgggtactactcagaattctaccacatttctactatactttattctatataaaaagacatatattttaattagaaaaaaatcatatctaacttgattcctagaacagtagagtaaagtaggtactcaaccaagttttagaggtagtgctggaatttcaaggataagcatccgataaaggcaacaatttcctgaatttaaattcatatttatagattagatgatctctgaatagctttatacttcggtatacagtacaatgattgataattctatattatacttcgtatggttgtcaaattaaattaaaagggaaaactaaggcggtggtaaaagcggtaacccgattaggctggttgtcgtgatggtcccaaaaagccctcgtacccttccttttcctcaacattgaacttcattttccccacttgtcactgcacgcagcaccagcgccactggcaccactgctcgtactgtttcctaatggcggctaccgaaaagtctggtatcagccttatgagccaatacaatattgttctaccgaaaaggcaggcgtatgactcttccggcaaacctatacctacatgcgatccagatcaatgtgctgcggcaataaagggggaggatctccccgtcgatctaagctcgttttggcatcaaagagcagttatccgtgggattcgtgattcacttcaatttgcaacaagcccggcaattcttgagctatgctccggtgacgatggtcaggcccatcaattttctcgtgcccgtaatgctcgcctgataatgagtgatgtaatccccgatatgcaaaatcctgccactcagccgtactgtatctggtatcccgaccttgcatcagaagaaacatatcgcgaagttgcccgtcggtatccgtctatgcggtatcaagtgggccgagcgtgtgctgcagcatgctatatagatctctacaaagaattggactttttgcctgacgtttctattgcggaagaatcccgcgaagttgataaagacgccgaaatctataagattattatatccgccccccaacgatatgctgttatggaagatttctctcgatctgttcatcttgaaaccccacgaacgtctgcgtctctgaatggcgatatgaagccccgatgggctttaggacagcgagttctccctggtaaaaatttaccagagacgactgctgatgatattgacatcgaggaagatggatttatcggctttcaagctatcagcttgaaggatatcagcggaatggaggtcttcgctgaactgggcccaggccagtccgatcaactgtggatgcctcttccgcctgatctcccaaatcttgaaaagcgccttcagacacagatggccgcgtgggagggcaatgtggatcgatacagtcgactaatgcacccacgtaggctgagaaccaaacttgaatataattgtattcttcgtggcatttatcacagtacaaccttcgccagatggtgggcctatcagctagaaacaaaccctggacgggctatcctcccaggtaaattgctcagccaaggcaatgaacgggagtgcagagagatacgcaccgcgattaatgcccgcgtgataatgaacaatgatatctctggtatcgacgatgactcggactgtctcccgtgggtcatatgggggcccgtaaagccctctgagaacactttagctgatctggttcgaaagtgtccgtccatgggacatcaagttgcgatcacttgtataatgtgtgattacggttcgatattccgaagtttgaagcccccctataccagatccttgtatgtggctgctaggcgaagtgaaaatccattctacctacaataccttgaggaaatcataaaggagcgcgacataactcccccggactttcattacttcaaggactttgatcacactgcaccaggcttacagactgatctggagcctagagatgatctcactagtcccactatcagctaccatgatatggagatcgggtatgggcaatatccctgtggaaatgaacacgaagaaacccgaggtacatatggaggcgggctagcaaatccgggaacggtggagagatacatgtggctctcaactgaaactgcacagaagttgaaagatgaacttgacgtgccctacccaggtgcggatattggtcatttgtatgacgatgaagaacttcgatccaagctttcacgccgtatacagcctatggatcggtagtatgcaggttttgatatgtcgaatacagtcagtccctttgattttcgagtattatctgccgagtattcgctagcttagttaccgatggcaatatcgctcgtagatactaggaccaacctttataatctcagatcagttccaatccctcttccacgtataatatagcgcgtcgagcacttgtggtataatagcagttctgtaaatacactctagcagcactggcacattgtgacaattcttatgcaggtaaataaaagctctctaagaaacttgcaggtttctcgaacttgaatgaattaccagtactgcgccgagcctgacgaagcaacgggggtgtgaatactcatgaaacaccactgtacgtgttccagggtcaaccgataacccaatcatatcacggtcctcgttacctgagcgggtcagtgcggccgtcgcgcgacctagggtaaatctcaccctgatctcacgcagcttctcaccctgtttatagtgcactcactctgtttatagtgcactcaccctgctcacccccggtcgagcgaccgtaaagcggcgctcacccatttatcacctgggcgacacccacccgaatatcgactgcgaataagccacacgccggtgagttagtagttgggtgggtgaccaccagcgaatcctcactgttgtatgtttatgtttttgtgttgttcattggcctgaacgtcgagttgcctagtatatgtgagattgagcagccgagaaatggttttctgtctactattccacggttagattttgatgttgagaggtccacattagcgggatagttccgcacgacgttatcaatcaaagggctggacacctacctgatggacactactacacctgaacaactcaacactccgaagttacctacatcgaaatttgcacccaattgctcaattgtattgaagtcccatcggccatgacagcccaaaccccaatccacgagcccgcaactgctgacggctggcatggcgtcatcccgagcgaggaattccccgccgagaaaggccgctaccacctctatatcggcctcttttgtcccttcgcccatcgtgtaaatttcgtccgccatctgaaaggcttgaccgaattcattgacatcagcattgtcaagccataccccaagggtgacgccaaaggctggccaggatggcgattcccggcctctgatgatgagtatcccggtgcgacagttgatcacctctttggtgaagactatttgcacaaagtctatttccgagccgaccccgattacaaggggcggtattcggtgccgttgctgtgggatacgaagactggaacggcggtttgcaatgtataacacctaatggatcttggcgagtaaacgttttactgaccggatatatcgtggttaggaaagtgcggaacttcttcgatggcttcccacggctttcaatgaactgcttccagcatcgctcgctgcaattgacctttacccggtacatctgcgcgataaaattgatgcagtcaccacgtggatgcaatctgatgtcaatgctggagtatataaagcaggctttgcgtcctcgcaggaagagtatgacagaaacgtcattcctgtgtttggggctctgaacaaactcgagaagattgttgcaaataatggaggcccgtttgtgctcggtcgagatttaactgagctggatatccggttgtatgcaacattgatccgttttgacacggtatatgtgcaacatttcaagtgcaacctaggcaccatccgacatgattatccagttttaaacaactggctcaagggcatgtattggaatgttaaagcggccagagactcgacaaactttctacatatcaaggagaatgtatgttgacatgcttttttggtactaattgacaccaactgacttgatacagtatacaaagagtcatgcggatatcaatccaaaggcaatcacgcctatgggtcctttccctaacgtcgaggaggggttcgaagaggactggagcaagttggctgtcggcgaggtcaagcacccctctgtgttagactatgaaactacaattcctgatctgtagtgattaatattggctgtcaagatgtttgatattaagttatctacgtcatgtctggttgtgcctcttgaatgcttttttctagatgtcagtgtttgagatagaacctaggagcacaaaatacatctaatgatactggagaattgggtcatggatggcatactttcgcctcatagacagaggatatcgagtgctaaatgaatgtatatgcatcctagcaagcccagctgggcagcgaaattatcctaaaaatcaatgtcctttgcaactgctcaatccatcgttctgcacacgttccctagtcctccctgtttttttcttcttcggctgtcgggtagcctcctcctaaccatcttcggaagaattcacctcttcaatgatccccgattcaacagcctgtgtccaggtgtggacattcttgtttcccttactagtgaaaattgaaaatgcaccattcggtccttcacggatatccccagagggaccgagtatctgcttaagcgactccgtgctaaacatccgatggatgttccgggtcttttccttctgcagaccgatcatccacgagtcaatggacccttttgccacaatttggacgtattccactaagcgaggttgtccgatgcggtacagacgacagtacgcctagcaacttattgttagcttgcctatagccttgaacccttctaggatctgaattcagacttccttacctggtcttgaatcgcttcattccaccagggatccacaaggatgcacttgttagccatagtcaaattgaggccaacaccgccagtcttcagggaggaaatcatgattttgatatctttctccttgctgaattgctcaatttgcctatcacgcgaggttggcgacaccttccctgtaatctatatgggcattgttagttatgtggctcggtgtttttctcttaccagtcttgacgtacggttgcatatttccagccctcctcctcacacatgaactgaagaagttgaatggtcttcaggaattgagcgaagatgacgatcttggcatttccatcctcttgcacccagtctgtgatgagtttccgaaccgctgtggttttcgctgacggcatacgatccccaatgcacgaaatccaatcgctctcatcctcactgggctcgtcccactcgcgatctgatggatttttcaatagaacctgttgtttgaaagacttttgacgccgctttttgaagatgttcctgccatttcccttccgcacggactgctttctcttctttggtgagccctttggtgaatcgtcggagtatccggcctccttgatgggttttttgcaggagctgcagatgcgggtggcggtatcggtatttccactttggtcgggtagtgcatcaaagcaccccttgcaataaaggtgatgacaggatgtgaccacgaatgcctccttctcgttcacgctattcgtgcaatgagggcatattctgcatatgacttggtagtgttttccctcgttttcgcgcacgcgctccacgtgttcgtaaaattttacctggaggtcggaaaagtctcctggaggccttggtcgaggagcgaccttgtcacccataccgagaattaagttgatgatgacccctgatgcgctcttaaccacgccttctgcttgtaccatctttttgagttttgcaatgacattttggttgagcacagtctcgaggaatttttgggcgaggagcggatggctcacaaacattctcagcattgttataacggccaagatgcatttgctctgtttctgtcttgtatcggcagacccttgtgagatgtgttagcgctcagcttcttttgctatcaatgtcagacctaccattgaccattgcaatgccaagatcctgaatctccctgtaaagaaacttttcagctgggcaaagttcgacctctacgacacggttattgatgcccggaagcgtgataatgggcttgccaagtatccaggtactgtatgtgctgcggtgtaggacagtttcaaggatgttatccaacccctatagagaatgttaatcttggattttgaagtaaaggcttcctcaaggagactaaccttggagtattttttcaggaaggtgtcatatcccattctttccgatgtaaagataaaatggagatatgggtaaagttcttccaccccgctagaaacatttagtcagtactcaggacttcggtcattccaaagcttgccatgcccaagtggtgactagttcttacttgtgtaacggcgtcccgctcatagcccatttgaatttgcctttcaaggctcggacagcgatggaggttgcggaatctttgttcttgatcaaatgagcttctgcgaagtcgaattagtatcaaccgcattgaatatatttataagtcctgtacataccgtcaagaatgatgcggtaccactcaaccttatggaaaggtccagctctacgatagtattccttttctctccaagcctcaagcttttctggagacttgatcatgactggtggtttcaacttcgggtgagagctgcagacttgctcatatgtggtgatcctataaggtcagggacatgaaacatacagtaatctgcttcaaatttcttacacaataagccgtttttgcatcgctctcacaacatcgctctcgctcgttcgggcaccggcgtaatactcgagaacatctctacttaccctttcctcgcaatgcgtagagatttgatcgatcctacaaccgagttaagtaacactcacattaatcttttaagtcgaagagtgagacataccactgtgcaatcaagcttctcgggacaatgatcagagttggggcttttgaacgatttgagaacttttcgttcgcgatatttgcttatggaaaatataagattttgacttctcaaggtggtcttcgttcttaccgagagctgtaagcgttttccccaggcccatctcgtcgcagagcaagcctccatttggctccaccgccgaactctcgcgattgcgctatgcacgtcagctaggtaccatgcttataacgtagaatgccaaacttaccatccacgcagcggccttgagctgtttcaatagttagtcacatatatcacaatttgaacctagtagatcaagatttcaaacctgatggtgcttcagcagtgttttgagacctctaaccttccagttcatgttgatgattgacgccgagggctcgaatttcctcgagtcctgaatcaatgaatttgcgtcttttttagcttgcggttggtcttcaattgaaagcttcgcaacttcctctgcgagcgctgtcgtcttgttcttttgctgggacacaggggtcaattgctgtatattagcgttggcctttgcgccgctgagtatgttactatgcatcagacccttgactttctcgatgaaactcgatgaggttgagattcgttcctgctcttttcccttgggtttgcttgagatctcttttttcactggcctggaagaacattcaagatcactatcatttctggaagattcagcgggctcgggctcggaatccaccagtgactcctcgtctgaggctaatttgaactcctcatcagaacagttttcctcgtcaccagaagactcctcatcattggagacttggttcgagcctgttttatccagcgattcctcatcaggttccttagggaaattctctggcacaggatcatcttgtttcaaggcttttttcgggcagaagtaagtggtgattagtttctgatttggcggttcaccttggatatgggcttccacgtttgtcaacttgctcggcctatttgtatgatcctctagctcggacttcacctccatgccattgacaggacttggagtgtcctttaggacctcctccattgtgttcgtagtatttttagtatttttagtgggtttctctattttgacagcactttgcatgttgaaattgatggatggaccatgggtggtgctgaggaggtggagtgaacaaagttggatagagaagtttagggtgtgcgaatcagaaataggagacgaggagaaataattcggtgagctagctcagagaagaagcaagaatttgaatgtaacaacacagagcatagaaatgaccccgaagttaaacggaggcgatgagacgagttgcttcgcgggttgaaacatagaatgcgtggagataacagaattggataatcaaggaatagatatgtgaagggttgattgtaacgaatagggtgaaggatttagaggtacggactggccatataatagagagatattgatggccgagatggaatagatgtgaatagaacgaggataaagccaagttgagggtgcctaagtgcaagaaggagaatgagagatacctcaaaggcaaaaaatacataattgccatgcagaaaaacttttgattgtcaccttacatccctaaggtcagtgagaaatagagagggtgtataaatgtgttggagggagtgagaatcaacaagcaaaaatatctatacctcccgctaatcccgggaattgcctattcagtaagcgtgaatagcctcaggtttgcaactcgttattgctattgaacctgtctaggtgacaggcactttcgcctacataagatcaggctttcacgttaagatcggagggtatagcatatttatttaacaaataaatcaatttttgcttcctatttactgtcatagggtcaccaccaccagctacttcaaagaatgacgtatcttgtgcctttgatattgttgatcaacatgtcttttataatctctctcattcacctcgttgactggaattctatcaatatctccgttatcttaaagatattgaaaaatatgtctcaaaatatatatcgttcatccttatccgatgttacccatagcagaatacaactttagtatatattctgccggtataatggtaactctctaaagaatcgtctgtaagggacttgtacctatgacatagtgtcatatcaataagacaggaattaaactctgagtagatgtataggccagaaaaccttgttaaatttcgccaatcttacagactattcttagagccgtgtaggtatacgagaatatttacgcaaaatgcactttgtagttggaaaataacagcaaagattcatcgactatcaataaactgatcatacatgccgtgaatcgtgaaagcatatccgaaaaaaggacataaacctgaagattgcagattgtgccaaatgaagtgtagatttgcacaacatagagtcgagatgatgagaccacaacagtgtcagaacgcgaaaaatcttcgaaggcctttgtatccaggctactggtcctggtcctactcaagctcttgctctggctctgagtggccttcctcctcgcttttttcaggagtagtagtgcggctatcctcgtttggctcgggagtaatagagcgacgatactcgggttgctggaaatcaaggatgcgacgaacatccctggggaaatatgtaggtgcctgaacacgggtatcctcacgcagctggtaaaggttggagcgggccatagctcgtcctagttggtagcttcctctagtctgcacagcctctcgaacctgggcgttggtcagactctcctcatgcagttcactatcatcttcctcggggacctgtgcctcatcaacccagagggtccgcagcacctctcgaccatggcgcatggggcgctccgtaaacggggtgttgcggggagggacgaaatcagacatttcgcggttgagtgggagaccaaaggcatcgcgggggccggtggaagcttcattccaagcgaggttggacggagtgtcttgctcttcttcgtcagaggtttcgaggtcagactgagttagaaagatgttctctttatcctcttccatggagtagaacccttgctgcggagggctgggggtctgctggtcctgcggatcttcgtaaatggtaaagttgaggctcgagggacggtgagattcccagacgcgcgagttggggttagtcttgggtggagaaccgggtagctcccggggctgtaggggagccatcgaaccggaattaagttgatatttggggggtggaaaccactcagattcttcagtctcctcggttcctggattcagaaaaatgagttgcccgtctcatgatttgagaataaacaaaataacttaccaagccgagtcagacgagactcatggaccgcaggtgttgagtacagcgggtttccgtagacagaagctaagtaccaaggggaaggcgcgatgctttcctcagctggatggcgctcgcgcttcgccccggtagagatagacacagcaaaagggttttggtcaaagtggtcttccaccgagggtagcacgtagggaattgcagggttcgtctggatttcagcgagctaggtggtgaacgcggagagcgtcgagtgttagcttgctgggacacagagggataacgcgcgcaaacggggaaagcgccgggatatacttaccccatcatcgcccactttaatggtcacctccacgtccgcgggatccatcttgaaagactactccgccgttcaattagtataccatgcccttcgcgagcgatgtgatgagtctatccattggcaatgtctccaggcaaccaatctgtctgacttgtaaagcttttggggagagagcatacctttaggaaaggaaagaaatgtagcaatattcttgctccgaaggatcaagtattggtcctcgctggttggctcaagcgccttgcctgtttcaaaaagaatgtcagcatggaattaaacgaggctcaaaggcttgtcaacacaggggatatacttggctgcttgggttaaaacaagagcaacttgaggctgtaactgtagctgtcctcgatactcggtggcccaaccaaccctgcacagtgtggtgtacaaggtctcgtcggcactatgtcgggtgacaacaaggaagacaagggatcaaagacagaattggactgtatatctcagggaaggtcgctagctacgcttactcttcgtgtgcttagtcgtcgtacgcgtcgctcttggtcgctccaactctcaccatcttagcatttagggttttttatactatatggactctaacttcgcaggccacttcaagtttagaagtacttcattgatttctaatcatgaacgataattatattgtctgaagttcatgtgtggcctaaaatgatacatgctcatgttatacttcgtctatagatagttaggggcaaggcttatcacgtgggcatatatgacatcatagcatgcacgttgtgtaatcagacatataatattataatgagatcaataaagcaagaacaagtgaaattctcattgctgtagattgaaatatgctaattcacggtactggtgtaccaggcgcaagatcaatggtacgtgtatatatagtgaacattcacacaagtctaagcagatcacaagggagacccgcaaacacatcagatacaaacataatcaacaaagatactgaatcccaaggacactgtaggatatgtagtatatgcaatcagaaatggaacacactggaacgactttggcataaacgaattaacagtgtagagaaaaacgatacgtaaaataatcacaggatagaaatttctagggtgacttgagattgggtcgagacgtattacctatattttagcatgaacattttacaaggagcccggtttcaaaaaaagggatggatagattgaggttggtcagctacctatggaataaagcatggatctatcggcaactagcgaagaacagagacccaataaagtcatagtttaagaccgtccatccatcaccctattattgtcaacccccggttcggtcttcaggactcgactcatcagacccacagaatacacagcacggacgcattgccccttgagagatttcaagaacaccgggaaaaatatgaaggggcgaggaaaaaaaaggacccggtaatagatgcagcaaaccacatcagagaagccaaagccaacgcagcaaaggctcaaacgcggaggagtggggggcagttattggacacgggcatcattttgccgaaaggccatgagcaaatacattggggcggaaaaaataaaggaaatgggtatttcgttctctcgaggggaagtgcgacgttgccgtgggatctgtgtggatggaaaatgaaaagagaaaatcacgagcccctgtacatcggcttcaccaagctagcgtagatactcatgaaatggtcatgggcagtggtaaatggtgcgtaaatgtaatcgaggggatagaaatctttttccaatattctccgtttatctgaactggccggggccgaccatgccaccacggacgtcaccgccgtttgactggccaaacatctctagcaggtgtctagatgaaggaggagggccctgtgggccagggttaccaccgaagggaccaagtcccatcatggcctcggggtttggcggcatgggagggaagcctggaggagggccgttcatataacctggaggtggcatcatgcctggaggtaggccgcgcgggaagccttggcgctcattcattgggggcgcgttgccgggcataggaagcatgccaggggggaagttgggattcatgccgcggcctggagtggatattccaggaggagggcccataggactcgatacaccctgctgcgggacaggctggccagtccatccaaggggtggcagatgctcgagacccgggggtcgctgaagtggcatggggggctgattcgcgccttgaagaggtcgcgagccacctggggtcatggggccttgattgccctgagggaatgacatatcgtcaaagaatcccataggcggaccattcgcaggtcgccggcggaggtgctcgctatctggtcgctgcatgtttgcaattgctgggtcgtcgaggaaattcggtgtcttttgggcagaaagccctggcggggggcgtggcatgccttctggcatgagacctggaggaggggcaatacccgagttgggagactgctgggatagatgacccgcagatggtggaccgactcggacttgctgcatcagacgaagcaagtgggccctctccagcgcctggggatccttggagctaacttgggccatggggttctcggggccagcgcccatgtagtcggatcggtgagagggttccctaggagatgacagagatagggcggcatgttgctgttcgccctgcatcatggagatattccgttgctgctgaggtaaacccatctcgtgaggcgtagagttctccgagcgttgtccaccaagcatctgcagaatgcgctgaaagccttcttggtccgcactgtgggatgggaaaggcatactctcagacgcctgctggggctgttgataatgctgggcctggggaggggcactgaaataaggcatcggctcgggttctctggcagggctctctggcatggggctaaagagacctgcaaaacgagatgattttccaggctttccggcaaagagggagggttcctttttagcaactggatcggcagcgataggagtactggcttctggggtctgaggctgaaccttcgaatcgctcaggagtccgaagaatcgttccatcgattcgtcggacataaactgagcaccggaattactgaagatctcaccatcagtgcggcgggtctccggcttttgttcttcaacatgtgcttctctcttctcctcagcaggtgccggggtttgtgcggatgatccagatccagatccagccttcatacgctccttccaccgctcaaagtcctcctgggtgtgcgctcgtcgtggttcgtctcgttcattggcatccagccattcaggttcttgttcaaatttggcgccgcggttccactcacgctcggtgccgtgtcgggtctggttttggcgccattctcggttgcgcaacggcggtttatcgtcatccgcatcagcggcttcttgggcctgttcttcgcggaaccagcttccttcatatttggatcgtgggggctgtccttctttccgaatggggaatcggccatctttgtcacggggaacccgttcagcatttggatcgcggggcccttctttgttttcccatctgtcgaattcgccgtttcgtcgaggcttgcgctcttgctcatctgggccgaatgtgcgacgtgggcgcccggcattccagtcttctctctcaccacgccgggcagtcagtggccccggcttggcctcccgtcgatctaactctttctctggggcatcgcggtccttgaacaacctgtctctgaagttgaatcggtcgttcttcgtttcatccgaatcatttggccgtgccgctggtcggtccgtcagatcgaacgagcctttgccgccaatgcgagatgaggcgaaggcggttttggggggaccgagtacaatatcctctgaaaatagaagaaatccaattagcaaatgcctcagataggtcgggatacttgatgttcgacagaaagggagacaataataccagaattagatccccgagagatatgtttggcttcaaaaaagctaggtcttctgtttgtgccagtctctgccggactgttgacatcacgggcgccatgggttttgcgttgtgtggttgtttggtcaggttgaggcctacaggttgcggtcagtcttgaaggtgacagtgcgggacagctgaagaattgcaagcattggagctaccatacatccactcttccattggaggcagaccagcaggctttgcgacaaggggcgagccgcggagccatatcagctcatcgatctcgtaccgtcgcgccatggcggctcggtctgtggggttgtgtgtgcgtggtcttcttcacggtgatgatcggttcattggttgaatgagtaacaaacccagattgagtaaccaaggatgagacgcgaaggtatgaaatatttctagcaaaatacgttgaataggaagcaggcagcgttgggtggttatggaaaagaggttggatgaggagaagcacacaagccaccttgtggcgatggcggtgaccagagtctcgggagccaactctccacttgccagttggtcctttgatcttagaaatttatatatctttcactcttactccttactacgtatagtcttgatattgcaaacacgatagtgttatacagtagttagtgaaagcccagatagtcaccttattttcatgttcaaaatacatgtggcatagatctataagacaagcgaccctcataagcgtacatgtactctgtcgcctgaatacccttcactataatttctgtaactagtaaaagcattattcgggagtgttaaaaaaaaacaatattagctatagaacaaaatacgggtgtatatgtgaaaagcagcgactgtttcatgtataccaaagcgacaggctttatttagggttaggcgtgtgtcgctattcaaagtaaaagtttaaagtttaagtgtgagagctagatgatatttcatttatattgcattgatgatattatagatcgtggaagcttatattgataccagtatatatgtcagaattgggagttgaggtagcatgaaagccatatgaaaagacatctgaaaaagaatcagtacgatataggtctatatgtataggagactcgtattacaaaatactgcagaaaatccttggattgtactaaaagacatggaagattgcttgttgaaaacaaccagccgaacacaatagatctcagagctgttctaacatatcgaaagaaggaagatcatcttctgttggagaagataattccaagataacataatgattattccagccacaagctagatagaccatcgtaagagcacagcagcgattatgacgggcaatacgctaattagctcccccagacctgcaaactcgggcggaattctgacattcacaaaagccccagccgcaagtagcacggcaaatgtgttgtagacaaaactccaaacgaaattgaacttgatacgtctcatagagaccttgctggcatccatcatggtgagaaggccagacagatatggacgcataagcacgacatcggctgcagactgggcaacatcactgccttcgtttatgtgaacgccgactgttgcttgcgcgagcgccacggcgtcattggtgccatccccgcaaaagatgacaatcggctccttaccacctgaaagactgcctaggagatctttgatgtagacctgcttgtccgctggagagctacgagcacgaatgttgctctcggggatagctaaatttgtcgccacgttttgcacggcgccttcgtcgtcgcccgataccacatgaaccgtcacgccgcgtctctgtagggtattgaccacatggggtgcatcagctcggagagagtcctcaagaccaaatacagcgagtagcacaccattgatggtgaagcagaacacagtatagccttttgtaagcaccggttgcaccagggggtgcgtggaagtcttcagccagcgagaattcccagcttgtagcgtttgactaccaagtttagcttccacacctcggcctgtcaagcttttgacgtcagggacagctgttgcaacaatccccttgtgcctaatatgattaccaacagcaaccgataccgggtgcttgctgtcaccgatgaggcccaaaagaagtgacaggcatgattcctcgtctccgagataactctcaacgactacgctgagctttccctgagtcagcgttcctgtcttgtcaaggaccacatgagaggctctataggcgacttcgatagaatgcgccgacttgaatataacccctcgctctgctgcgataccgctgcagatgacaaccaccatcggtacggcaagaccaatggcacaaggacatgaaactataagcaccgtgatggcgtaggtgacagcctgcacggttgcttcggatctagtcttagcttgtattgatatgccaagagccacccaaataacaaatgtggcaatagtcaagcctacaataactggaacaaaatatgaagccaccttgtcggcaagttcttgaatctttggtttggaaagcttggcttcatcgaccatggcggcgatagtgttaatagcgttgtcgcctgggaggcgagttagcctgacaattagacttgccgatccgttgattgtccctgcaatgacacgcgacttgggtttcttttcgacatgccgcgactctccggtgagcattgactcgttcacttcagatgacccagatacaacagtcccgtcggtcgggattctcatatcgggaaggaccttgaacctgtctccgtattgcagtagcctgacgtcgatttcacgagcatctattgaaggtgattcgtccacaagaagggcagtttgggcctgaagcgatcgaatagatattgactcgaccgctttttgtcgggcaagtgtagcgacatatcgtccgaacatgatcaatgtaactagaagtgtgcttgtttcaaagaattggccagtggaaagaggtctactagcaacgagaaagccgaaagaaaccacagagaagatatatgccacgctggtgcttaacacaataagaaggtccatctcgatgactcgcgaaaagacaagagccttcaaggctttgggataaaaaggtcctgctatgacaacctgaatgatagtagccaaagccagcgaggcggagctataggcgatttttctctcggagatgggggcccatgccatgattaagactgggatggtaagaactgcagataagagagtcatgaacccggaatggcggacatgcttgctaccagctgcaagtgttggatcaccagagatgggcgcaaggcttgctatatcaccccagtgcttttcaatgagatctcgtgctccaaccacttctggatcaaaagatacacgaatagtgcaatttccgacgagcgaaatgtcactcacaccttgcggccaagcctggttgacgatcaaacctggatccccagaaacaattatatccatagctgacccattactggcgattatctcacatttgaactctgtggtccgctccaagtgctttataacaagctccacagtagagatactgaggtccaagtcgaattcagctcgagatagaaccaaacttgtcctcaagttcccaacccctgacattatcgcgagggttctgttgagtttcgtctcacagccagtgcaagtcataccagatatcgagaggaccacatgctcaacgcctatggcctgaccctcgagatcaggggcaattcttacagccccacccttctcgtcgttgggtaaggatggcttttcggaggtacagcaaatatcagcacaagagccatccgctggctttatctctgacttatctgattcggagatacaggggtcggtgaagttgttgccgcaggtggtaattttgggtttgcagcaagagttggtggagcaaccttggctggcacgagttttagttacacgtgcaggcttgtactttccgccatggtcggtacttcgaagcggcgattgacttgaaggtttactacttgcgcagcaagattcaaccgagacgcacgagacagactgtttcagtggccgttcagagctccgacccttacccagcgaagagcgctttcgaggctcgcagcatgattccttgccaagggcaagaagagcacggcagatacaccccagtgctgtaagcctagcagcatactgctctctaactgagcgatggtgtcgattgcaagctctgccctgaagcgttgcaccttctgtcggtgtggatgtcgaggaaagagctgcattagacccaaaattagtagagtactatgacataagccatttatattcaacatacagtaaccagctgcttccatgcatggtatatctgaccccgtatgacactcacgtaaagccagacgatcaaggcaggcttcatcacagcatggcgaaggcttgtcttggcagcactctgccacaataggttcaacggaagtagcatgttcactcgaccatggggtaccggagccggtgtgtgtgtgagggtggcccgaagaaacactagagcttaaaattttagatttggcggtaaaatttcctgcgcaacaagctacgttagcggaaaaagcatcaagacgacggatattcttaccagcagccgaggcagactggtcgcagcagccttcctcgcaagccccaggcagagctgcacccttacaaggatcaatagggtccttgtatacggggtcatcacgctgggcagcggaagttgcattggcattattatcatctgttttgtcgttctttcggatagcgccgttcctataagacttctcttgacttgaagtctccgatgaactgccacaacaattcgatgaactattcgatttcttcaactcagctttatcaatcgcatccgcttgagagggcgtcctttcacagcaagagcgtcccataatgctggttggatagttcaacgtggagtcgtgggaggattgtggggatctgggaccgaggagtggggtcgtcttttggcttgtttggcttgtttggcttgtttggcttgtttgcagggaactactcttcgtagtacgtactagtactgcttaattaaccctagagagcctttcactaactacttacacgccagttaccgtatttgagtagtaaaccaattcattattctagcaaatcattccaagcaaagtcgagcagagcgttttgttgtgtactctatgctttctctatgtgaaaccgaggtgaaacaagaaaactagatgttggatggtaatgtgattcccggggccccgcaatttagatactccgtacagtgctgcagtaagtactaccatgctcgtgaatacttcaaatacagctattgcccgctgatacggatgtgtacgaatgcttggcagttcaaccttacaaggtcctccgtgcttccaaggttgcatttttatcagtggagcccaggtccggtgtttatgtacatatcccgaagtccgttttaggcaatgaatatccaaggcaggggtccacttaggacgccagcctacattctattggttcctgggaattgcattaaactcaaagcacgtggaaatgaagtttcggccgaaccggctatgtctcggaaccgacaaccggccccggtagtgcaggccctaagtcgttccctccttttaaaactcagcccattaccgttgcaacttgcaagttggccttggattccccgcaatacgccctgcagcattccacaacatccatacttaccctttgggacagagcgaaacacgaagctgccgagccgaccgagccgaactatatacttcgccttgaacaggcagcaccacagtttctggggattggatgctcgataattataccaaatgatctattgtgcctaccaggcctgtcgattattggaaaggcagcacatccactggaataggtgttgaggcagcctttcttcctctctgtccctctcagggaacagctcaattcattccatgtttttctttctcattcctattcactacaataggacggcattcttcaactccgcatggtttccattacgtggtgcacgtgtgcgtatggggtatactgtgtgcaaagaaacaagaagtaaatgacattcgaaaaactgactatgacagagaccacccacggccataaagacagggaaaaacaggacaaaaaagcagtcggaaggatacaggctgggcaacaacaaaccgaacacttgactcatggctggcagttgaccactgtggtgatcattcaatgatgccccgaactggaacccggcttcagacagtatattttctgcacatccgccaactcagcctcgaaatcgatctcaaggtttttcagcagaccgtcggccaaatcaaaaacccaaccatgaacgatgggatactggttctcttggtagctttgttggacagccgcggttttgatgatattcctacaggattcaatcacattgagttcaatcaatcgattgtatcggtcgtgctcgtcggatatttcgtcaagttcttgctcgtgcaagcgataaacatcgcggatgtttcgcagccatgggttaagcaatcccagatcagcaggtgtcaaggccgcctgaacacctccacagttgtagtggccgcacacgatgatatgcttgactttgaggtgccgcacggcatagttgatcaccgacatgacgttgaggtcaacattgggcactaggttggcgatgttacggtgaacgaacacctcgcccgcctccagacccatgatttcgttggcggggacacggctatcgctacagcctatgtacctgattgccgttagacgaaaaagacaaagttggagcctatgttgcttacagatagtctggtgattgtccagcagcaagcttgtcgaaaaaggtcgcatccgtctcttttttcgacgcgacccatatcttgttgttttggaagatatggtcgagcgactgttggagatagtgattgccgttcggttcggaggccatcttgtcagagtgtacaaaaacttggcaaatatgaacgtggtttgaggttttggtggtctcacgcagagcagggagcagatccgaatctgttgggacctgtcgaggggtttgtgcttatataagcacgtgtcaagacctcgggaccatccgcaaccttttccaaggacccggtcctttgccttcgggtattgagttatcacggtctaacggaaactcttagtgtcaattttacaccgactatttcgactacagcttcactatctcaagagtagccagccacttatgcggtctgtcatgtcttttgggtagtatttctggatgtcttgtttcggatatcccttatcggttttatagctagacggcagaaaaaggcggaagaaagtgtagaatccttcgtcaaggatgttataaaccaatgacgccatgactctgattctgccattcacattctacggtcagcatcataccgccgcccgcactgaaccgccgcgtttccaaggtcgcacacctcggcccgtgtcggagcggcacgcaagaagttgacactcgggtgagatagccaggggaaatagatcggcaccggcccgcgcggattcgagctcgtagctctcgagcaagccgaatttcgggtgccaggtgcacgataagccggccccacactgacgccgtccgatgagatctgcagaagctgatcgggtagcggctggaggacgagaagcggaagctcttgagcagcttacctgctcgcagccgatgtgctgaccaggcggctcatgtcgtcgctcgcgaggctggggatgcatgctcttgccgtcccagggtggccgtccatctgcgcctggagcagggacactttggttgggtcagcgaggtgcaggccggcaagacggtcccgtcgggagaccatgcaagcagtcctagatctagatggtggaatgagtagcgcttgcgcttcattttgtgcagttcacgatgttgacgacaccttctcttttcctccccgggatgggctgctactccgctcagacaatcactctcagtttgacttgcaactaggggtcgatcatggttcggaccacaaaattttcgtattctttaaatttcgatatttgatccctactttatctatgtccatctcctggactgagacccgagaaagctgtggagggaaagttttcgatgacctttggaaattggtgggtctagacgttcatcccagaagaataggatagtgatgcagaatatgctagattgtgaattatgctacagtacattaaaaatgcgacctacaactttcgcaaagctccgtcgttcagcatgaaaaataacagtatcaatcctatgaatttccgacaggtttgaacaactggtccttcgggtgtgggggataaatacggggcgttgtagctgccaccgatgccaggtaccaaaaatactatttggtggaaagcatggtgttactttcaatggcgtggctatcgatgatcggtgaatactggatcatccacacgtcgttcactacttggcggagtatgcctgtttcctcgtaggtcgagtgaaaggcaaatggaagcccttgatcaatcatgtactcgaccacttggccgattgtatgacgcatcacattcacgttgctgaaccgacctctcagtttgtgtaccttaacccacggaactttgagctcccccacgactctgagtgaaagtgaaagtggaggattatccgataccaaggcaacatcaggtaccttggtatatccagttccaaccgacttaaagtcagcaaaccggatattcacgtgttgtgccctgaagacagctccaagaatctgccccacagattgttcgaactgtccctgaacgcctgtttcatcggcaacatagacttcttcttctctcaggtcccgaccgtcaattttgtagtcgattatggcttgggatcagcttgtcgacatgctagcccggacatcggcatcgaaggtttgccatcaagatagacgacccgtatatctaatactgtgcaaggcagaggatttggtcgtgttgggggcaatccgaaggcctgggagagcactcttgactgcatctttagaaggaccttctcaggcattatctgaacaaggcctcttgtcagtacaccaattaagcttcacgtgcaagactctttggtaatacccactaagaaatagaaaattcaagatgcgcaaattgctgggttgggaagcaatcaataagagagagtgaatatctggatagatggtaatgatgatgatccagctactcccatgaagccctctgaatagttcatggagacaaacggcctggaagccacaaaggtctcagaggggccttgaatggcagagaaagcccaagtgtatgcctaaatgcagcaaaatcaaacctccggacattgaacgaattatagagaaagagctgatatatctcgaatgaggtgcgactcatatcataggccattaggtatattacctgttgttacttctcctacactaagacctagataacatccagcccatatttgagcagtagactaggcagaagtaggcgtttgttagcacacctgcggtaagatgggccagcagcatgcaaacaaacctagtacgtagagtcaaagtaatgatgcagactgcctttttgagttgatatacccacacccctaagatgcctgattcttgccacattccttaggcatttgatcaattggatactatctagcatctagcattgagatcccctttttcagaattgaactatcttgattattggtgttaaatagctttgggggatcttttaatgggacgacggtaagtgttagatcatctccatatggcttggtgggtgattaatcagatgttaatagtttggtgtctggtttactttaaattgacctcacaaatttgtcgtcatttccatcgtctccttgatctgaccttcctctatctacaattcattccatatcacaacatcttccctatcggacactcacgatgcccgaaagagagcctcgtcagtttcttccccagatgattggtgaagggatcattacctactgcccggattctgatgaccctgtgttatcttctttttacaaagcgcgccaatgggtcatcgtggagaagctggatgaggacctatacacggttaccccagaggattccgaccaagacatgggccccgcatttactactggaaaatttctttgtcgccgtggacagcacggataccatgccttcatgcatatacacaaacaaatccctctgtatggcactgaattcaataggtcggaggatcgggagaatcaggcttccgatatgtctcccgtggagctaaatgccctgaagaagtttacagagaatgagtgtgccgctgctcctaaactgcttggatatcaaattgatatacaagatccgaccgaccttgtttctggcagatttatcatataccttgtatttgacaaggtcccaggacgtcctcttgaatttgacgagttctggagttttcccttacgcaaacgcaggactattcgtgagaagttcagagtcgcctatatgtttgttatacagtacaattatgatcacgttcttcgagctaactagaattagggaaattctgaggcttgggtaccagcctttggaaccatcctcattacagctcatatacgagagagaggaagatgatatgtatgttctactatacccctgatagcacaatcaccggttttgatatagctatgaagattgatgaagagccttactggacagacaacaactttgtgatatataacctagttctgcttccctcgaaatatgagaagtacgttcccaagaagaaggatatcaaaactgataagaacggctggaggtggtgagaaggagaattgatatcaaagaaggaaccatggggcaatctctgtcgctcggtctcatgtgtgtgaccaactagcttacaaagaatactaccaagatctatcacaaacgattctctctattcactttaagtactaggaaagtctcacccccgtagaatcgctcactacaatttctcaactcttcagtctacgtccacgtctctgtaaagctgtctccatagaaattccgctagtaggtcttgaaataaaggatttgggagtctttggttggaaatgtgttctgtttcggcgccccttccacaaatttctcctggaccacaatcttctgcggatatattgccaatatgctatcctcaccgattcacccctgcttttctaagctggccatatacttttttcaatgtatcggacatcacagcctgtctgcccagtttctaaatacgaagatgtcattcacgtcaccaccgcctaactgatgaaaaggataaggctgacgtcgagagcctcatatcttggcatcttggcatcttcaaagtggaagcttgacaatagaagcatttcaataatttttgacgattgcgcactgtactacttcacccgtgactagggttggggggaggggggaggtgagaggctctggacgtttgaaaattgcgaatctggagctataatggtttcaacggagcaactacaaacttgggaaagatcctcgagtgcgcctacagctgtcactgggtccgtgagatggtcagtgttacattcctataccgattcgtcattcctcctcaccatcccgtgctgtcgcagcccactctcctgcagaagcttcatcttaaccggaggaggagtcgatagtccaatgcaacgctataacgcaattgaagcagcaaatttgcccttgaccgaaatttctgttggttctctgtatttattgttgattttctccattggcaaacgtcggtccaccagctgcttttgattcccaatgagtatgtagactgtactggttcatcaaagactatgcagaactgacattctggacaacaccaggtaatagtgagaccatccttacagacacctcggtggtggcagcccgcggagtgagcgaggtgaagtcgctgcatttggatgaagggttagggggggactctcaggcatcgcaagaatcccaggaaccctatgatgatgtgttcacccctccaaccgatgaagaaaatcaaacattgcgcaaagtggccgccaatctcccgttggttgctttttccctctgcctggtcgaatttgccgagcgcgcgtcctactatggggcacagacactcttctccaactttgtggaattcccactgcccgaaggtgagcctcattttcaaatattcagtgtcgagagtgtcattaacaagtataatacacaggtggcaatggcgccggtgctcctccgcgcggaacccaaaagacagccggagctctgggatggggattacaggccagcaccggcttcgtgcttctattcaaatttttggcctatattgtccccatcttcggtggttactgggcagatacttatgtcgggcggtataaggccatcatcattggtgtgtttatctgcggcgttgcccatatcatccagatcgtcggcgcgattccctctgttctccagaaaggcaaagccaacgcagctccaccgtttgtcattggcctcttacttcttgccatcggtgccggtattttcaagccgaatatctctcccactgttctggaccagcataaatcccagacgccgtacgtgaagactctgaagtcgggtgagaacgttattgtcgaccccgaaaccaccaatactcggaccatgctgctgttctacatgtttgttaacattggtgctttctacatgttagcgacaacctacgcggagaagtatgttggatattggctttccttcctgctatcgggtatcatttacttctttcttccaatcctcctccttgctgtctataaaaggaccaaaaagcaacctcccagtggaaacaaagagctcgccgaagcctttaaaattggatggactgctcttgtacaaagcaaattccagttctggcgcaaagacttctgggatttagcaaaatctgccaaccttcgcagtaaggggatcgaagttagttggacagatacctcagtatcaaaagttgcgaaaacaattggtatcatcatccctcaggcatattgatcaacgaattctaacatcattaacagaggcatgcgacatcttctggtttttccccatctacaatttaaacgacggtggtatcggctcagtcgccacgaaccaaggcgcatcaatgatcacaaacggagcacccaacgaccttctcaacaacttcaacccgctaacgattatcgttgtcatcccgatcctgactttcgtgatctatccgttccttgagcggcgcaagctgaagcctggctccataacccgaatgacgattgggttcgctgttgccactttagctggcatagtcggtgcactagtccaatggaaagtgtaccagctctcaccatgtggcactcacgcatcaacgtgtgacgacgtcgccgatatcagtatctggtggcaaattcccaatacatctctcagcgccataagtgaatgtttcgccaacgtcacggcgtacgaggtggcctatgctcgtgccccaaagagtatgaaaggcctggtgattgctgttttccttttcatgacggccctatctagcgctcttggtgagattcttatcccggcgactgcggacccatggttgatctggatttgggctggtcctgctgtcgccctggcggttcagactgttattttctggttccggttcaggcatttgaactctgagaactacttcgccgataatgttgtttctgatctggttgaggaggagcaagtgtcacttaaaagggaagcttgagtttcatcgtctaacaacgcaaagattggagcggggcactgcttgtcttgtttcatggatgacgaagtgcaatatatttgccaacttcattcactctcctctactattcaaatcttttcggaagaacgcttgacttaagatagacagaccttctctgtaatcatctgactggagaagagtcttgtgccggctactgatacggttacgttcgagtaaaaccaagtgaagtaatggattttagtagagcagattatattgagctatctgaccggaacatagagaattgtcgcaagttctagtccaccgttgtggagccaagccaagcgcctgtgataatttccaatccgtctttcaaccaatccgtttccaacgttgttgcaaagtcgaacccatggtcagcatctaggccatgaagcttaacaattgcatcgggcgctttttctcgcactaaatcaaagaatcgctgggagccctcaaatggcacagctgaatcctgctttccatggaaaatgaaagttggaggaagtttcagacctccggcagcagcgagattttcaaccctcttcatagggaagaggtagtcttctgacccgaggaactctagcaatcgaccattttggaaaatcgagaatgccagctttagacgatctgggggatctgcagcagtagccacagtgggcaagggtgcggttcgcatggctgcaatgtgttcttcaataatttcattcggcatgttgggaattccaaggatagttttgggatatgcctctgtgtagaactttgatttcaaatcaagaactggataggctgcgatgacagcacgaatttctgatgggtagctgagtgccagttgaatagccagatagccgccttacactcaagtcagatcatttgttcatgcaagagttcactacaaaagactcacccgcgctttcccccacaacgatgagcttgtcgagatcagggacaatatgaccatatccagcatcttcgattgttgcagcaaattttgtgctgtgtatccaatgccaaaaatcgtccatgtcttccaatatatcctttcccgatacttcaggcagcaaacggtagtctggagccacgataattgcccctgttgatatagcgtagtccaacgtccaattcgcgaaccaaacaggatagcgactagaaccagtgacctacaggcaagttaattcacagtcgaaggattgtgtagtcttcttagtgcaagtagctcataccaaaaatccgccatgaatccgtatcatgactgcacatttcgaaagttcttgctgtgatagtatagcccgagggatgagaatatctacattgatgtgagaacgaccctggttgaagctcttataactcgtgttgatcacttgaaatggctcatatttatcagcggtgtcaaacttcgagaaaatttccaccaagtggagataaggatcggttgccatattgatgctcgatatgggaggagatagggcaaggaggtggggttgttcgttcgtttatgtaccttgcgccttcgcatgacctaaaggggaaatggagcgaaagcgaagagccgagtacatacgtaccccaagacccgcaaggttcggctagtctgtaagtcatagagctacggacttgactaagcaaatgaaagcatagccgtacgatagatggcagtatataatactggcattgttggaatcttgcgctttgtcattgaagtctagttagcgactgcacgaactatgcaaacaaaccagcagatgtaattgtttcacagctgaatagagatgtacatggtgcaaacagagcaaatagagcaaacacagcaaacagctgatcggcatatcggcgatcggcgcgttcccccgctgtaaagtgattgcgtaactacaggaaaaaagaaagaacctccaacaatttggctatttcggcccatttatctgtccaagctgcactgtaacttattgcgatctatacctctccattgactcgccatcgatagactggaacctctggttaaccgacaagatgggccaggacatgtccccgccacagggcgtcacatcccttctggacacggatctatacaagctgacgatgcaatgcgcggtcctcaaatacttcccggatgtttgtaagtagccctaaccgagtaatggggatctgggctgatctgggcgcagatgtggcctacggctacacgaatcggaccccgcagatgaaattgcatcgcggggcatacaaatggcttctagagcagatggacagtaaggatatcccttcttgtcgcaatcgtacagcttctaaccaatttgcgtgtagaactggccgtaattcgcgtcaccgccgaagagcgcgaatggctccgccaaaagtgcccctacctcaatgatgagtacctcgccttcctagagaccttccacctcagaccctccgagcatatcaagattaagttcattccggaagaagatacgggcagcgatgacgacccaggagacgtggagtacatggttgagggtctctggctcgacaccatcttgtatgaaatcccgctgctggcgttgactagccaggcatatttcatgttcaccgacaaggactgggactatgaaaaccaggaagataaggcataccgaaagggttgcactttgctccggaatggctgtgtgttctctgaattcggttcgcgccgtcgccgcgactaccatacccaagatctggttatgaagggactctgccgtgcggcagaggagggaaagaagcagggctggcccggggtgttagccggaactagcaatgttcactttgctatgaaatacaatactagtgccgtcggcactgtggcccacgaatggtatatgactattgcggctatcacggatgactaccagaatgccaatgagttggcattgagctactggcttggctgctttggagagggggtatgtattgtcaactctccggtatttagaaacacctcaggctaactagagaaacacaggttcttggcattgctcttactgacacctttggcacaccggctttcctgcgtgcattcagcaagcccatctcagtaccaaatcaaaagggtggtactaatccgagcacgacaacctacgctcaaagctacaccggtgttcgccaagactcgggtgaccctgcgttcttcatcaagatggtccgggacttctacgatagccagggcattaccgagaccaagacagtggtattctcagattctctggatatcgagcactgcttggagtacaaaacaattgccgaagaggctggcttcaagccaacctttggagtgggaacattctttaccagtacgtttgagttttgcaatctcctgcaacacaaactctaacgaattcgcagatgattttattaacagatcaaccggactgaaatccaagcctctcaacattgttatcaagatcgccagcgcgaacggcagtcccgctgtcaagcttagcgacaatctgggaaagaacatgggcgattctgagaaggtccaggaagtcaagaagaagctgggctatatcgagcacgagtgggaagagggtgatgagagtcgccgctggacgaaaaaggcatagactgcctgcctatctgcaccatacaatttgcctttgccactaaatcataggccatttgctaaagacttggtaaacatgagcccatgatcatattgatgttggagaggtggttattgatatttgctagaaataatgtgccaactccatagagaataagaatacatgatatcctgaagaggtctgaattccgttcctccgcaacgaggctctccagtgaggtacacccgagccatatgcactaaaagcacccaaagcttagaccatctcaccttcctcattttctccgttgccttcgtcacttcgttcgcttgttcgtctccaacgtgctcatagtatcctatctgagccatgggggttggggattatttccatttatactcacttttgttatcgttccttcctcgggcagaaagctatgaatatcttccaatagttgccaagttacacgtcaagggacgacaacaaaaatcctaatttgttatacataacctagaacatatcatccccagactcgaaccccaagtcccgatctagatcgccagtgatttcgggccttgcatcattcattgactggtgacgaaaatgcattggatgaaagtcatctgtatcattcaaagtaagacagaacgcatcgtgattgttttgatcttgatctagtggaggtgttgccttttcaggcatgcggaaggtttctgtgttactgtactgattcagatcagtgtcttgaaacagctcctgtgcccagtcgacggtatcttggtcttggggcgggggtgatatatagggtttatcttggttgttgtttggattgggaggggtttgaatatcacggaaggagtcgatgtcgatggacataaagttgaaaggattgttgtctatgatgccaagatcggaatcaaagtcgaagtcattagggaatagaggaggtgcgggttcatgtgtggtttcgacgctgggcttaatatgatgtatattcccctgagcagatgaagtttgtgcttgcggcttcgagatcttggttacagcaggtagatgtgcttggggttggaatatggaattgacattgcttggtttcctggtcgccaaagacgttgcaggggcattcaagttgtattccatgacttggaagaatgtactagaggcgcccgcctgcattttgatagctgcctcgatgttggcgaactcttgactggcggccggataaatatccttgagacagtgaaggccttggatacaacgatgaaagttgtcgacactgctttcgcggacagcggggtcctcggacatggtgttggtcaaatgcgccacagcggcaggtagaatcacagtcactccagactgcggtagaaaccttgtcaggttgagctgattcaggccttgaataatatgtgtgatccccgcggcagcatcgttcatttttgtacgggcagcattgcgccagtccgtccgcgatttagattgatctttcaaagcagtcgcccgaggtcggtgaagtgcactgctggtagcatgatagagcatacgtaacatcgcaccatgaagcagcagcacattttcaccgtcatagaaggtattccccgacttcgggatgaattgcgcatctttagggagggcactaagccaagagtcgagcttttggccgcatcgcgcaaactcagactcggaagcctgtcgagggataagtgtgactgtggttcggtctgtggcaccaaatcggcactgagatggtgtatattgtgcgaataataccctaccaatacattgacagagcttcaccttctcgatgaacagggtggcgaggcgtttctgatgtgacacatcttggagctgacggcaacagaacttagccaccacatatggagagaaaggttcaaaatcaaaatcatccattctgagcattggaacactgctcgttccatcattaacctgaagcgggcgccgcatacccatggcgatcagccgatctcgagagtacagacaccaccagagccgagaacggagccgttgagtccgtatatcaatttcatctgatgcagggtctttgttcaaaccgattgactgtgcttgtgtattacatactccaatccaatcccatatatctcgctgtgggctgttctctgaatcagcccagtaggtcatcaataggagtgcttggagaatcacgatgcgatcctcttcgcagtcgagagaatagagtaactattgatgatgagttagttcactgatgtcgcagccccttgaagaaagacaaacccttaatcgagtatagaacgcattacgcgcacttttccgggttgaatacccagcatcctgcaggtgcttaaggtcgacgaaagccgtaccaacaaacatgactgcctgaaatagtaagatgctaacatttccctctgggtcattttcagccacacagcgtaagaactcttgcaggttcaaaactggcatgaaactgtgtacccattggatgtagcagcgcagaagctcatcccgcaacccactctctggaattgagacggcaccacgaaatcgtaagaactctaagtcttctggggatatgcgagccggcaagggttttaaaaaccggggctcgtcgtccagtattgccgtcagtgggtcaaagtccgggtctattaggtcttgaacggcagacaccatgtttgatagaggcatcgagtgctgcacattggggttcccccgtgtacgccatatcccggcaggttctgactcgtgtaaccatggggattgcggatcgtatccatgaagatggtggcgcttagccgtgggctcttggcaagattctgccaacttacgtttgagagaagttgaagacatgggctctcaggtgtgatgtgtcatgtggccctggttgggggtagacgtatgcgattttgttccacagggacctcaacgcataagcctgcaagaaggcggtgttcggaactggggaaatgtgggggcaactctgcggggtcttggcgcctggggaaatcggcccaaatatcgttggcttgatgtcattctgctccattggggatttgaattggtgaatctagttggctggatcagtgatctatatacgatgagaaatgaaattattatagtccaccagtttttgaccatcgcttcttcatataaataaagtacgtaggtcactatacgtactattttctccagttagggattcctattgcagcctcacttttataaggccctcggagtcagcccaccgagtagtttcaaaagacgcccgtgataaatttgatcgaaatcatgatatattaagtactcagttcatactcaatccgtcagtcggtactcacaataggattatttgtgaactacttcctgatcaccatatgctgcatactcctactccgatcgccgccctcaaaatatccgttacaacaagacgaggcaaagaaatcaagtcgcagaaacagcctgttggttgtttatttagagttgcccgtgcgtaagtggtatattccatctttggacatccacatagcttgccttcactctatcttattggccacggcttgttggttcctttgcgcttcttcggatacttgctcagtcatgggtaagatattgtgtttttctttatgaaggatgatcgctaagcgctacaaacaatcggaggcgaggggctatatattggcgctcatatagatgacatactatctgagagaaagatagagagatggcttgagccaagttgcggtagaatggtagaatggtagaatgggaatttctagtgtcattgtacaattggatagacaaggtgttcagcgatagtaaaatatatatcgctgcgtgtttcaggcatagattcggcattgctataattctgttgttttacctcatgtatcaattggcgtcttattctacactgttagagatttaataatcgacacaagaaacgtacgcatccatctcaacttgttgcagtcgctgatagctactcatctagtgttgtcagccgattttcaagatttgtacaactgtgctattacaaagcgcagtcggatatggctgttgcctcagagatctagtttcagcctcttccaaatcttgagggactaggtcataattatcacgggccaaaaattggattgtaccacagccggacatccagcaaatggcaaaattcctgatattcgtgaatctcaaaacaggacacagcatgtcagatagtacatgccctgccaataaaatattgtacaaattatccaatcgaaaaacagccgagcgaaagatgctcccgcatcatgttttcctttgaccgacgccgatatgcttccacaggtttaaaagagggagtccgagtcgtaccaccggaggtatagaaagcgtgatggttttacatgctgcgcgatattagatgaggctcgttcggttgatctcgatgcaaatgtgttgggttggctcgacttacggaggaaggaggaattctccgaagcttgagtggaggaacgcaataccggcctaaagatattgtcagtttcatggataaaatcgagatgttaaaattgttgattaggcaacacgtacgccgaagatcacgatgctgcggacaatggtcttgttctcggggttggtggcctcgtcgtagacagtgcggacgaagcctttctggggccgagagccagagggaacgatgcgctggtgaggggccattttgtatgtgatgtgagggacgaatatagagaacgtatgttgatgttggtgttggagtgatgatcggacgtcgagaaatctgcggcctcgggacgcttggtcactgcgcctttagctcccgtggacaaccgtatttattttgcccgcgcagtgaaggacaatgcgacagcgtcgtctggcctgtcctttatatctagatctcctcactgctgcttcggatatatctctcccaaaaccaatacttctacatatatcactgccacggatagtggttgtctccacattgtccactgaaccggcgttttcgccgcagcaaccaagatgaacgtcgatgagctcttcaaagtgagttccaagttcacctactgaattgatggcatggctgatgagtaaagaaatcatctgcaacagggagcgctaagcgcaagttcgagcccgtccaagatccaagtacgccctttcctcgcaatgcgcttgccgcaaatcctgacgatgacagatgaacactacaaatcagcaaaacttgaccccagtggcgatgtaagatcaaatggaaaagcaccaatggtggaggacgagattgacgacggtgaagctggacccgagcttcctccggacttcgaggacgacgtcccagacgacgaggagggccgcttcttcggcggtggaatggagcgcaagacagcccaagcaatggaatacatcgatcagcaagaggaggacgaggctgcggtatggaacttttggtacacatggtatctatccaggggctgacggtatacttatctagcccgagaaattcgactctgcgtgggtgcgccgttttgcattgaatttcgagaagaagatatccaagaacgctgaactacgagcaaaatttgagaatgatccgcaaaagtaagtggataccggacatttgtatgtaccgggtgctaatgatgcttcaggttcatggcttccgaggccgacctagatactgaaatcaaaggcttatcaatactgtctgagcatcccgacctatacgaggagtttgctaagatgggatgtgtggcatccttgacctctctcttgtcgcatgaaaacaccgacattgcaattgatgtcgtccaaataatcagtgaattgacggacgaggatatggaagcagagcaagaacaatgggatgctcttgtcaactcaatggtttgttgaggcatggaagtatcagtaccaagtgctaactatcactagatggaggccgacctcatcgaattgttggctcaaaatctctcccgacttgatgaaggatctgaaacagatcgagtgggagtatactacgtgttaggtgagtatcatgtttcaagaaatactgcgagaattttctaattcaataaaggtgtaatggaaaacctggcctctcagacatcacacgcggagaaaattggacaggacgctgcaatcttgccctggatcctgtcccgtattcagcgaaaagaagcgattgtcagccaaaacaaacaatatgccgcagagattctggcaatccttttacagtccaccccaaagaatcgcacgaaatttattgagctcgatggcattgatatccttctccagctgcttagtgcataccgcaaacgcgatccagctaaagactccgatgaggaagaatatgtggagaatctgtttgatgctctgatctgccttgtcgaggaagacatagggaaagacaaattcgtggaggccgaaggtgttgagcttacgctgatcatgcttaaggaaggcaagttcagtaagccacgtgctttgagggttcttgaccacgccttgggcggagtgggaggtgccccggcgtgcgagaggttggtggaagtagctggcctgaagacagtgttcgggatgttcttgaagaaagtaagtttgctctctcgcagtcaaattgtggtatgctaatatccatccagcaagaaggtcaaaacatcgaacatttcttgggaattttcgcctcccttctccgtcttctgcctggtggttctgctccccgcatccgcacgttggccaagtttatggagaaggactacgcgaggatcgagaagcttgtcaatctccgacgcgagtatgccgcacgtattttacccgtcgaacaagcgattgaaaaagaacgcagaacgtttgataaggaggagcaagaacttatggctagtgaatggctatcaaggcggttggacgcgggtttgttctcattgcaggtatgatttctcttttgcgatggcaaggctccttgctgacttgctgcagacaattgatgttattttggcgtggctcattgccgaagatgatggagcgaagaggaagatcgtttcacttcttgcggaccgtgacgaagatttgtccctgatccgtgggaccttgcaaggtgagtaatccacattgctgtaattgccggaggctaactcgagtagaacaaatcgaaggtctcggagaggatgacctgggtcacacagagttgaaggacatgctaagcactcttttgcagtttgtttgaacaatgacagaattgtaacgtatcataataccaatgctatcagcaaatccaatccacagggtcacctcggcgccagtacacatagatttcactaagatctaatattttcctcggattgaaaagttagcttgttgatatagacatgtagaccaaaataccatcacatatgtatagagatcttagtatcttaactacgctgcttcgaaattatgttgacaggtagaaaattccagctcatgtacgaccgaatcagttcagaattccgaactagaagatgtcaacatgattatatgaaatcgaagtatgaatccaagatatttaatattccttaacaggaatacgtcccattgtccgttatggagaatgggtatgtatgtacctaaggggtcagggaatgcgcctgacacaactttttgtatggataagatgaactcaacctttcgacgatcctgcgactaccacggctcgatacaattcgtcaaaatacatgatttcaaactccagtgctctttattaggatctccccttcgttacgttaccgcacaacctaacgacttgatccgtttcttgtctgtttccgtcctcgacgcgcaacacttgcgcgccgggtggcgtacttcgacacagttatggcgagtgcgtgttcgctttcgctggttgaggtcgatggatccatcgcgtagggaattgcaggcgtagtcgaggagttctggtggtgccgcgctatcatcagacttctccgtagacaatgaagagttagccgtgggctgatttcggttttatatccggcccttcgctttcgcccctggcccctttgtatagaggcagttgtcggggagacgcttgataaatctgtacgcccaattgtaaccgagcgtccactcgatcttatggcgactaagaatcgaggtagcatagtcgtgaatcatgtcggcagtcattgtccaaggtacgaatccactgaattaccgcctcctcttgctcagcatccaatgctttgtgggtgcctgtacggcctttttgcgattttgcaccattgatccgaccgcgcaataactggtacggaattagattcccgcgccaatttggcgatttttggtttataattttcagggtatgatcgcaaggcaattccaatgcgatcttccaattcttgggtttatttagtcatatttggggtgatggcaatgaataaactgtggtaggtatacaaaaattatgttgttgatgaaacattgcgccaagtggcttggcggtcatggatagtcacgtgcatccacgaccatattgctagggcggtgagatatgatcacgtgcatctacctcatcgagactagcgcatggctgagaagcatccagacatctggagatcagtcccttcatcggaatattgtcggggagcctctctttcatcccccccagtttgtcagccttgctttttgcatctgtctctgactccttgacttcataacaaccccactttcgaaaactgtcaggcgagcgttgcagtgcgttgggcgattattgcgaagctcctacgccgacgcgccttgcgcttttctaccttcctacacctccgatcctcattatcttaatcaacacctaacctcaatttatcgcaaccatggtggaatacgaggagacatacgaggaggatttttacgatgaggcggacgagggcatcacctctgaggattgctggacggtgatttcgtccttctttgactcgaagggtcttgtctctcagcagttggattccttcgatgaattcatctcttcgaccatgcaggagcttgtggaggagcaaggccaggtggttctcgaccaaacactccccccctccgaagatgaagtcgaaccgatcgttgtgcgccggtatgagctcaaatttggtactgtcatgctttcgcgcccatccgtcacagaaggcgatggtgcgaccacgatcatgttgcctcaggaagctcgtctacgaaaccttacttacgcttccccactttatctcggtgtcacaaagaagattatggaaggtcgtgagaagatgggcaagcccaacgacgacgacgataatgagggcgagagtgatccaaagactcaaggtacatacctcgattgggaaacgaagcagctgccccaggagcagatgaaggaggaaacagtttttatcggaaagatgcccattatgctcaaatctaagtactgtatcctcaaggatttgaacgaagcgtcactctatgcttggaatgagtgcccctatgactctggcggctacttcgtcattaacggaagtgagaaggttttgatcgcacaggagcgcagtgcgggcaacatcgtccaagtcttcaagaaggcaccccccagcccgacaccatacatcgccgaaattcgaagtgcagtcgagaagggctcacgtatgctttcgtcgcttacgttgaagctttttgccaagggtgacagcgccaaaggaggatttggcccgacgattcgctcgacgctcccatatgtcaaggccgatattccaatcgtcgtcgttttccgtgcgctgggcgtcgtttccgatgaagatattctcaaccacatttgttatgaccgcaacgatacccccatgctggagatgttgaagccgtgtattgaggagggctttgtcatccaggatcgtgaagttgccctggatttcattgccaagcgtggatcgtcacagacgaacctgaaccacgatcgtcgtgtgcgctacgctcgggatatcatgcagaaggaattgctgcctcacatttcgcagagcgagggcagcgaaacccgcaaagctttcttccttgggtatatggtgcaccgacttcttcaatgtgctttgggtcgccgtgatgttgatgaccgtgaccacttcggaaagaagcgactcgatctggctggtccacttttggcaagtcttttccggactcttttcacgcgagtcacaaaggatcttcagcgttacgtgcagcgatgcgttgagaccaatcgcgagatttatctcaacattggtatcaaggctagcacattgaccggcggattgaagtatgctcttgctactggtaactggggcgagcagaagaaggcggcttctgccaaggctggtgtatcccaggtgctgagtcgttacacattttcctcgtccctgtctcatctgcgccggacgaacacacccatcggcagagacggaaagattgccaaaccccgccagctccataacactcattggggcctggtttgtccagccgagacacctgaaggtcaagcttgtggtctggtcaagaacctggcattgatgtgctacatcactgtcggtacacccgccgaacccatcgtggactttatgattcagcgcaacatggaagtgcttgaggagtttgaacctcaagtgacgcccaatgcgaccaaagtgtttgttaatggcgtctgggtgggtattcaccgggacccctctcatcttgttacgacaatgcagaatttgcgtcgacgaaacatgatctcccatgaagtcagtttgattcgtgatattcgtgaacgggagttcaaaattttcaccgatacaggacgtgtctgccggccactcttcgttatcgataatgaccccaagagtgagaactcgggcgggttggtcctcaacaaggaacacattcggaagctggaggccgacaaagacttgccaccggacttgggcccagaagaacgccgtgaacaatacttcggatgggatggtctggtacgttccggagcagttgagtatgtcgacgccgaagaagaggaaaccatcatgattgtcatgacccccgaggatctcgagatctctcgacagcttcaggctggttacgctctgcccgaggacgaaacgagcgaccccaacaagcgtgttcggtccattctcagccagcgcgcccacacctggacgcactgcgaaatccaccctagtatgatcttgggtgtctgtgctagtattattcctttcccggatcacaaccagtcgccgcgtaacacatatcagtctgctatgggcaaacaggccatgggtgtattcttgacgaacttttcgcagcgcatggagaccatggccaatattctctactacccgcaaaagcctttggccaccacccggtcaatggagttcctgcgcttccgagagttgcccgccggtcagaatgctattgtcgctattgcaacttactctggttacaatcaggaagattccgttatcatgaaccagagcagtatcgaccgtggtctgttccgcagtcttttctaccgcacctacgcggacaccgagaagatggtgggactgcaagttgttgagagattcgagaaacctatgcggattgacacccttggcatgcgcaagggtacttatgacaagttggacgaggacggtatcgttgctcccggtgtgcgtgtctctggagaagatattatcatcggcaagacagctccgttggctgctgatgcggaggagctcggtcagcgtaccaaggcacacacaaagattgatgtgtcgacgcccctgcgcagcaccgagaacggcatcgttgatcaggtgctgatctccactggtaatgacgatctgaagttcgtcaaggttcgcatgcgtaccaccaagatcccccagattggtgacaagttcgcctctcgtcatggtcagaagggtaccatcggtatcacctatcgacaggaagatatgcctttcacccgggaaggtgtcgttccggatctgattattaacccccacgctattccgtcccgtatgactattgctcatttgatcgaatgtcagctcagtaaggtttctgctcttcgtggattcgagggtgatgctactcctttcaccgatgtcactgtcgactcagtgtcccgcctgctgcgcgagcacggctaccagtcgcgtggcttcgaggttatgttcaacggccacactggtcgcaagatggtggcgcaggtgttcctgggtcccacctattaccagcgtctgcgccacatggtggacgacaagatccacgctcgtgctcgtggtcctactcagattctcactcgccagcctgtggagggtcgtgctcgtgacggtggtcttcgtttcggagagatggagcgtgattgtatgatcgcccacggcgccagtgctttcctcaaggagcgtctctttgacgtatctgatccgttccgtgttcatatttgcgacgactgcggcctgatgacaccagttgcgtgagtattccgattcttcatttatacattttcgtcacacagaaaactaaccgtttttatagaaaactgaagaagggtctcttcgagtgccgtctttgcaacaacaagcaccgtatctcgcaagtccatattccctacgccgccaagctgttgttccaagagctggcctccatgaacattgccgctcggatgttcaccgatcgctctggggtttcggtgcgttgattaggttgctcaatactttacatttgtactttaatgatcttgctggaaaaatgcgcatctgcttggcctgtttcacggcgtctcggaggatcgttggccatcgcattagaataaccggccctacatacttgaattgaatcactttacgtgtggttttcccaggagagtcataaataaacccgacaccctgtttcctgctaccgacaacccatcttgtctgtttgcagctacaattacggatcataatttacagtgaacatagatgcaggtcgtatctcattattcattgatatctcagagtaagacctaaaccaaagcatgaacaagtccatgacatcgcggcgatgttctttggttgacgagataccgtttgtcttggtcaggccccctttgggtctaggaggcccaggacagatcttgtcatcttatggcttgtgctggtcacattgaccggcgcaagataagcttgtcggagtccacgaggctggatcggatgatccagggtggacgttgtctacatcgatgtattgggatcaatgtcttcgtcttcctctcaccacaccattatcatccccgcccaaccgcagcgcgaaaccagtacacctgcggtgcgggctgtttttggtttatcattttcagaaaagaaaaaaaacacaaaacaaacgcaatgaccaagtctcaccagaccggaaaaagtcaagcgaaagaacaaatagagcaaacaacctagcgaggtccaggacctgccggagaaacaccatctaccggcggacaacaataccctgacgacgaacggcattgcgagcacggcggtactcctcatcactctcgcaatcagactccgaacagctgtcatcagaagactggtatccacagcgggtaccaccacagtcaagtttgacacggtcgcccttgcgggtgataccgtagcgctggcagcggcagtgcacgggcgggtcgctcatagacgagagcgaggaaggcgaagtcgagcccgacgacgaccgcgacgaaacagacgacccggccgagctgggcgggctgttcgagtacgagtactcgtctgacagacgggagccggcgaagcggcgggtcagctcgtcgacagtcggggggaagtctgcttcgcggagttggcgcgaggcgtagttcttggttggcttggggtgctggatgcgcgagggggacagggcgcgaccggtcacgacgtcggcgcggctggtcttcggggcggaggaccggctggtgggcttgccgccggggacatcgaggatgttgagcttgcggccggtggttggctcgacggtgtattcgacggcggggtcgtgcgatacgtggtacccgtccatcatgtagtagtaccagtagcggcctccgagttggagcatggaggtctggaagcggaacttgccgacccaggcgccgggcttgccttcgctggagagggggatctggcgttggtagttgtcccatgaaccgaccaggtggacggtcttgacgttggacgaggtccggagggagaacttgagttgaacggcggccatgatgaatcaaatgtatcaaaaaaaaagttgtttaaaaaaaaggtgtcgtagggagcagaagatcaagagtatcgtatagttagaacaatctaaaactgccagagtttgattgtcaagtcgggatattggactctttgatctttggggaaccggtccgacaaagaagaagataatcgagcgagattatattaaagggtttgttgtagatgtctgttgaacagcgaaatcaagtcgaccggcgacaggtagactgggaatagttgtaaaatccgaggaaatccgtagcaagtatatcccaaagagcacagctcgtttgagggtagaaagggtaaagaatattagaatagtatagaagataaagaaagaaacaaaagtccaggcaaccagtgctcaggataactcgaataggacagagaaacacaacaaacgctcgctgaagaagaaaaaagagaagaaatctgcctcgaggtggctatggcattcttttaagccggtcaattcgatcagcagtgcagattccgtcctggaacttgggcgcgtaactgacgatgttggttggttggatgcaagttgcactgtgatgtgctgccctcatgcctctggccaatgactggccaggatttaacgctggtggccggactagaagaggggagagtttgtgaatacgaaaggccattgtccaagcagggccagggattcgaagtctgaagaagttgtcagcctcggtagattaattgtggcggggtctttttttttgcagggtattgaaagcctaatagtataggtagaacagataagattttctggatatgaacacgcaaagtaatattcggcaatcatttctctgagcgacagattcaattgataattgaacgaaaggcaggcagacaggactaaaaataactaagtagaggggtccttaggtgtaatcgtcctcgctaaagtcatcgaaaatccagttttcttgaatctttgttctctcctccgtttccgccatatcaagagcgtccgctcttaattttctctcgcgtgcttttgcttcgtcatagtgtgcaataggtagttacccacccctcatgaccaactccaacagcttcctggcaagcctggaactgcgtatcagcttccgactgcgcccgttccagtcgcagatattcaatcaactcattatctgtaaaagaaattggacagggtgccttcgcgccatggctcacctccgcctacttactaaacagagtaactagatctgctttcaatgttatattgtcaccgtcctatgggtcactagcgtgatggaaaagacgtcgtcgtaaagtactaatcaaggtattgtaataccctagattaatatctactatcattttgatacagagatagtcaagttaacgtctgcgtagagtttctacttactagaacttttctatatctgttatatcattgaaattattattcggtaaagttgggattcgtagtgattccgaaactttattactatagttttgtagactatcgggaatagtatattaaaggaataacagaagaattgtggtatactgccaattaattatccctttgatttctatattattagaaataaatatattatttggttaaagatcgggatattatatagtaggacgttggagggctagacagtctcgcggtataagataaggagtaatctagaggtaattttatagagctataatatgattaaagtaggactaagcttagtaactatatagctctcggtaaagacgctaaaagagttcaagagtccgcctaaatttcttaagatatacaatctcttttaaggtaccggtagtaaggaccgctagagaatctcgatcttcctaagtttaggacatctcttctgaaaagcttgatctaagggatacttacatagtccttatttaaccgatagattaagtcttttcctatactataatcgtagtgaagtatcagggctaatacagaagcgctgtatcgagtctaggcttagggtaatgattcggctgtctctatccggtaaatcgtcgcagtaatagaggcttctgtttactggaaattgtaagttaaatagacgagcctccaattgcacgaattttgtcactattgttcttctctcctgttcagacaaagcataccacacatcacctagggtttttccttggacaagttccataaagatatattctgtacctgcagaatggacttcgcttgcgaccacgagagatttaggcttagtaactgggtatggaattcgtgcgacaaatcggaagccgtctcgcatggtgatcagaaaatttcggttgaagcctccttcggcaagcttcaaaaaaccaacgacgtcgtccccattctgctgtatcgctagagcagtaaggcgcttcagtccagagacgttaaaaacacgtcccctctcacgatgtctcaacctgtcattgtagctagagttgcaaatcagcagagcagcttagtatggataagatgtaagtctgcaacatacatccatcgcccagacgtgtactcgaacaaatcataagggtcaggcattttccggattatcgagacaggacgtgcgagcaatatcattctagatgtgacgacgcgtgagaaaagaagaccagaaaactcacttcgatttagatgcttggtcatggcttgatcagttgaagaatatcctgaagactttggacagatggggctttatatcgtcgcgacccttgatgcgcttctgtcgcgtaggtacctaggtgtacgtaactagttagacctacctaactagttagttactccgtgactacggagtagttgtagttaattaactaatgcagtgggggtttccagagcaggatgactaagcggccctcctgaggcttagcgcatcatctctttaaatacggagtactggatatgtcattgatttggaaactacctcttcgtgatgcccccagggagctcgcactaggcaaccgtcttcgctaggctgttgggacaatatattcgtgccttctagtagtatcccgttgttgtgtggtcgggttaccccacaacgggccgcaccgaacagccacgccagattcactttagtcttcccagcggggattaacaccagacaatggaagcctagaggttcaatccatttatcattggaagccagaaaatggatccacaagttgaatgcttgatgatcaacgtacaagactcaagagacgaaggactcgggtgaaagcatttaacgcgcaattccatagttgaaacataattaggccatgcaggcagggtataccgcaagagctaagttatcaatttttagtacagtttccagatgtacacaaaggtggcaagagaaggacttcctataacatttgaattagtatgatattgacctatttagacggtaggcaaaatctgatatgacacactggtggttagagactgccgtaggccgcagttctaaccaacacttaatacatcgtctattatccgttttcagaagcattccctctccaaattataggcagtatctctagtaatctggagtgttcgaggtaggaacaaacatctagacttcggacgttcacggcgccgatccgaagatgagtcattaatgagtcagcatacctccgacttcaaccaatttgtttccaatgataagtgtccaaatatcgacgcgagtacaggccaggcgttcatctggtcatttataatcgacacaaaaacatcagtatcaaaacaagcgcttccatcgaacccggttgaactgcacatcaccactcagcatcccggtaggagccaccttcaacctagcctgcgaccgaatccaaaatggcacacggtgcggaggactgcgcaactgttctggagcagtttgtccacgatgtggcaaatctcccggctgagctcaaccacctcatggaggaaattcaggctaaggacaagcttatgcaggaatgccgcgctacaatcaactcgcgcgacagcagcattcagaagttcatcaaactgaacggcagtctaacaccgaacccaaaggaagagccatacagcaagactattctgcaaaatatggataaatcacacgagctgcagaacgagaagatccagcttagcgagaaggcatgcgtcctccttgatcgccagatcaaacgactcgacgtgcgcattcgcgatctagtcaacgaaggtctcctcaccaacgacccgcctctcccttccctcttcgactccaaaaacaaataccgcaacccacccaaaatcttcctccctgactccaccccctccgactccaccgcgtactcaacacccctcaacccaacttccggaaacgcgaatgccatcctggctgctgcgcagcgcttgaaccaatccacagcacctcgtgtcaccggctccgcagcgcagctcggacaaaccacagcacgcagctctgcacccgccacacccgctgctgctgctgtcgtgcaccttcagcaacgccaacgcgaatcctccgccggcgcagtggacagcaagcgccgccgcttgaacccatccctcaacacccttcccgtagcctcgtcgaaccttcgccagtcctccatgggccctggtacaccgaagccgggcacaccggctggcagccgtgcaggcagtgccggccctcgtgctagcatgggcatcaagaaggcattaaccaaaaaggtcgcaccgcaccatcaagtaaagaagctgaagactgccagcggaaagccgatcaagcgctcttctagtgctagtggtcgtatcaaggcttcgaagaaatctcccaatggggagggcgatgaggatgatgactccatgctcagcagtgccgatacatcggactccgacaagagtgacggtgctgctgatgaggatgtcgatgatgaggacgaggatgagggtaatgaggattcgaaggtctattgtacctgtcgcactgttagtcatggggatatggtggcttgcgacaatgatgagtgtccctatgagtggttccactggaagtgtgttggcttgacgcgcgagccggttgggacttggtactgtgacgagtgcagacgtactctaggcaagtgatcctgttctttttctatgatctgtatgacggtttatatacccatggcgtttctgtacttgttgggatggactggacaaagatatgtacttcttaccaattttactgcatgatttaaatctgcttcgaaggaatcaatttcatattctgcccattctagacaaaaattgatactaatccctaagggaaaaggatgacaagaagcagaaatcccaccctaggtatccattcccagctatagccaagcgtatgtccaagccgtgcccatccagcgcccaatatatccccagggtcacagggagccggagcctaaccaaatcaagtcgaaaacgccatcgctatgcacatgtcccctttttttttgtttcttccatgcaaacatgttggcacacaggcgcacacagtgcgccgaaagtcagaaattagatattcgtggaaaagccattgctcgccaatccactcaaaacccaagcccattgttcagccacggatcgaagtactcgcaggtctcggggcttaccgcgccgcctggcgcgcacaaccggaacactgggcactggccgcaaggggcttctgacatgccgttcttcacgaggtgcttgtttgcaacggagagatcgtcgccctcgatgggcggcttgcgggactggttcgcttttacggcgtcggggcttttgagagatctataccactcgccgttgcctaatgcgacgagcttgttgtcgtaacagagcatttcgaggagttgcacaacgctctcttcgcccaggcggacaggcgtgatgccgctttcgttgactgccgaggcgatctgcgccacggtcgggtatcccgcgtagccgtgggggtaggggaggtaggttttctcatcggtcttgacgtccaccttgccagaggcggttttgatgcgcttcttacggtctgaggcggggacttcgtaccagcttttccggctcacggtgtactcgatgtaccctgcgacactgttgatgaagttggcatccagtacaccgtccgtaaaccaggctcctccggttacctcttcacttggagcaagcccggccaacatgtacatcttgcggctggggtatttcacattgtggagagatttgatgtagttttttccttcgagggatttcaggcatcgatcgaggatcgacttgtgcaggttcgtgcggtttccaatgtgccgcacccagatgcctgttcgttctgtggagtggatgacattgtagaccatggcctcgtccggggtaaggttgcggagcctggagaggaggaggggttagttatgtgctttatcgactgagatgtgtctgcaattcctacttctcggcatcctcgcggtcaatgagcttccatgtgagctttccatctttttggaggaggcgaaacagattttgattgacgaggctctgggtgcattctagcagtagcgcaacgtcgttctttgggatcactttgagattgaggaagtcgttctgatagaacaagtgatcggggtcaaactcattcacgcatgcatcatagagctttgaggcaagctcggccacttgggaccccgcggaggccattgttggagatgcgacggagatatcaggcaaaatcaaggttcattcgaagaggctcgtgggttttcatgttcaaggaagtgtgctagagccagggagtaagttagaggaccatggtgcgtcgatgtcggcaaatttgagtcacaaaagaatcacaaatggtgttttttttggcgactttttctcggcggggaccgactttgacccaaaagggtttagccccgtgaagcttcaagtgtcagcgtccgtgcctgaggcttaataattcctgcctgaggcagtagatagcaacggaaatttcgagaagctccggccgttgagctcatgacctcagcactttcagttccttgtgatcttatttttgatctgcatttctcccttttctgagcaatttagcatatcactacaaaatggctgacgctttgaaggcagaaggcaacaaggccttttctgctaaggactatcctactgctatgtacgcgctaccccacctttaacactgtgacttcgtcaaagcagaaactgataaaaccagtgagaaattctctgaggcccttgctatcgaacccgaaaaccacatcctctactccaaccgctctgccgtctactccgcccagcacgaatatcaaaaagccctcgaagatgccgagaaggcgatcgagatcaagcccgattggtccaagggccatgcccgcaagggtgctgcgtaccgcggcctcggagatctgtgtacgttattctagttgtgcccgaattggtgggataattggcattgtgacaaggtgctaactgatggcagtggctgcgcatgatgcctatgacgaggccctgaagatcgagcccggcaacgcacaggccaagtccggtatggaggcgacccagcgcgccatcaatgcggaggctaccgcagatggtgtcagtggtgacccaacaggaggtctcggtggaatgttcaacgacccggctctgttccagaagttggccaacaaccccaagaccgccgccctgctgggagatgccgagttcatggctaagctgcagaagatccaacagaaccctaacagtgtcggagaggaaatccgcgacccgcgcttccttcaggttatgagtgtgcttctcggtattgatatgaacttcggtggcgagggagcggagcctcctattccttctgctaaacccagcacctcgcagtccaagaaggagcccaccccggagcctgagccagtagacgaggaggcaatcgccaagaagcaggccaaggaggctgctgatgctgagaagaagattggtaacgatttctacaagaagaagcagttcgatgaggccattgagcactataccaaggcttgggacttgttcaaggatatcacctacctgaacaacattggtgctgccaagttcgagaaggccgattaccaaggcgcaatcgagatctgccaaaaggctaccgaagagggccgcgacttgcgtgccgacttcacgctgatggccaaggcctacacccgaattggttctgcacacgagaagctgggcgacctcgcgcaggccatcgaattctacaacaagtcgctcatggagcaccgcacccctgataccctgaccaagctccgtaacgccgagaagaccaagatcacgaccgagaggaacgcttacattgaccctgccgaggccgagaaggctcgcgagcttggccagcagaagttccaggaaggcgactggcccggtgccgttgacgctttcaccgagatgaccaagcgtgctcccgacgacccccgcggttactctaaccgtgccgcagccctcatcaagctcatggcattccccggtgccgtgcaggactgcgacgaggccattaagcgcgatgccaaattcatccgcgcgtacatgcgtaagggcgctgcccttatcgccatgaaggaatacaaccgtgccctagacaccttcaccgaggccgccgaccacgacgacggcaagcacgctcgcgagatcgagcagcagcagcagaagtgcctggacgcccagttcagcgctcgcgctggtgagaccgaggagcagaccatggctcgtatccaaaatgaccccgacgtaagatctaatttcccctgcaccggattattcagcatgaagtttactcacattttctccagatcatggccgtcctccaggaccccgttatgcagagcattctccagcaggctaagagcgaccccgctgccctgcaggagcacatgaagaactcgcaggtacggatgaagatccagaagctgatggctgctggcgttatccgcatggggcggtaaatgctataagggtgtagagcattcgagggatttgaatacgaattgacacgatatatttttgccagcatatttcttagtttctaaaattccattctgcttatatgcatttaatcttctagagtagtagccagccagtagtgatgcttcctgtaattactgcaaatacaaggttgtatgaacgagtcctcgcgaaacatgtatcctctcagtcggcattgtacggagtactccgcacgatatatatcagccacaatatatagtagcagacaccagccccaacatacagacaccagccccaacatacagacaccagccccaacatacagacaccagccccgacattaatatacaattcttataaaacctcggcctcagctcgggcccgtggtcttcatctggcagttctcaagccgaaaaaatgaaaaaaagacaaaaaagacaaaaaagcgccacacaagtgggcgagtgggggttcccaattagagaaccacaagatctaaccgaactactttatctaccaatcataacatgaccattgaaggattcactctcttcgtttgtgttatatattgttgcacagacacagaatatacccgatacacacagctgggagtggaaatagcccctcaggaccaaatgcaagtctagatgtgatatgatagatcaattcggcgtgcagcacttggcttgtctatcgctgagtatttaggttgtataatcgtacaatatacgtactccatcgaggttcctcggtaaagaatacccattctccatatccaaggaacacctttggtggatacacagagtagacttggccgatctacctaatcgggattagggcacgatgcgaggtcgatagcgtgcgatgtgaccaagtttttcattacattctctggatgcatgccacgtgtaccttaagagctgagagtgttctaggtgaagtacgtagacaatgacgacatgccatatacatatactagttagtataagatgcccctatattgtactccgtacgggctgcatatcttgttgcctagacaggtaaggtagggctagatcgatagcctacaaagtacaaagtactagatccgcaaataaaaaaggggcattgaacccaggagatgcccggagtgccctagagccctaagaataactagaatccatggaaatcggagtttatcccctccattgaccctctactgaccctctacggagtattgctgaccctctattgaccctctgtggctgtgctgaaagctcggagtttagcctgtcattcccctgacctcctcaattgacggattttgattgtactagacaattgaaccggtacggatatagtcttgtagaataacctcatagactcatactccgtagactcagatgtgttgtatctgctctctatatgctaaagtgaggaatctgacccagctccgacgtacgtcactgatcttcgatcgacctcggtgttcgcgatctccgatctccccttttcgctctcttttctttctttttattgggctttcaattctcggaattaataatttacctaaagatatacataaggtatttaatagaaatatccattggcgtatcgtaaagaattccagccacagttccccttgacgcaagcggctgggcaacttgagctgtgcctttggtcccactcctctcctcttccaaggttctcttgtttttctctttctcactctctcgatcactctgtaccctggtatacaatagcataccaggccacctcttcgactacgacctcacgcaatcccggtacgttaattggtagacctgcgcaagtcagcagtcagcattcttcccctcaccccaggttccgctgaatccaatctgaccaccctctagaatatccccggctctctcaattccccccgaccagaacacagcaccaaccggcgatatggcgtccgccgacgcggctaagacggatatgaggatggagggtaccatcgaggccgcccaggaattgcaaaaggacccggaatcacaggttaacccggatgtcgttgagaaaatggcggtcgacgaagcccaaaaggctggctcggctgcataccaattcgaccccgatgccacgccagaagacaaggccaatgctgctaaagcggtatgtgtcgcaaaaagtccgagttgtgttcggcacaatcaccttgctaactggcatttcgtctagcgattgccgcctaattttcaccatccccatcaagccaccggtgttgctgtcctgacggataaggtgaggataactggttttcgcgatgcgctttcaatctacatcctaaccctacttagaccgacggcaaagcagactatgatcttcctccaccggaatccgcgaccgccattttggccgaggaagccacacgagaagatgcgggtgagaagcccgtcgatgaggatcttcggtgggcgcgcgacagaacgggttgggccccaaagttcgtcgatgagaagctcgcggcgattttggccgaggaaggcacattgctggatcacgagacatttttggagggaagaatccctgataagttctttggcgactggtatcataattgcgggattatcatcttcgcctgcctggcctcatggattgtcgctgttctaggcggtggtataggctgggttcttatggtcatggcagcatgcagcacctactaccgtacctccattcgacgagtgcgccgaaacttccgtgacgatatcagccgtgaaatgtccaagcagcgtctcgagactgacaccgagagcctcgagtggatcaacagcttcctcgtaaagttctggcctatctacgcccccgttttgtgcgacactattatcaacaccgtcgaccaggtcctcagtacttctactcctgccttcttagatagcttgcgcctcaaaaccttcattctcggtaccaagcctcctcgcctggagcacgtcaagacctaccccaagactgacccggataccgtcatcatggactggaaattcagcttcactccgaacgacattacggatctgacttcgcgccaaacaaaggacaagatcaaccccaaggtcgtgttggaggttcgtgtcggcaagggtgtcgtgagcaaaggcctcgacgtgattgtccaggacatggcttgcacgggcttgatgcgtgttaaagtcaagcttcagattccattcccccacatcgagcgtgtggacgtctgcttcctggacaagcccgaaatcgattacgtctgcaagcccctcggtggtgatcaccttggattcgatatcaacttcattcccggtctggagtcctttatcaaagaccagattcacgccaacttgcagcccatgatgtacgatccgaacgtgttcccgattgaaattgctaagatgcttgctggaaaccctgttgaccaggctatcggtgtggtcgccattactctgcacggtgctcaacagctcaagaacccggataagttctctggcactcctgatccatacgccgtggtgtctttgaacaaccgtactgagctcggccgcacgaagaccatccacgacaccgacagcccccgctggaatgagacgatttacgtgatcattacctccttctctgatgccttgtctattgctgcgtatgactggaacgagtaccgcaaagataaggaaatgggtgttgctagcttcgcattggacaaacttgagcaggagcctattcaggaggggatctatctggaagtgcaggccagtggccgccaccgtggtgctattcaagccgatatccgcttcttccccgtcctcgagggacgaaagaatgaggctggagaggatgaacctgcccccgaagtcaacaccggtatcgctcagttcaccgtggagcaggccaaggaccttgacggaagcaagagtctggttggaaagctgaacccttacggtgtcctgcttctcaacggaaaggagattcacattacgaaaaagctcaagcgtaccaacaaccccatcttccagaatgcttccaaggagttcctcgtcacagaccgaaagaatgctcgtttgggtcttatcctcaaggacgatcgcgatatcatgcaggatcccattatcggccgctaccagatcaagatgaacgacatgctgaagatgatggagcgtggccagcaatggttccatctccacggtgccaaggagggacgcgtcaagttgactctccattggaagcccgtcgagctggggggcattggcagcgctggctacattgaccccattggtgtcatgcgcttccacttcaagcgtgcgactaacctgcgcaacttggaagctatgggcaagtctgacccctacgttcgcgtgctgctttccggtgtgactcgcggccgcacagtcaccttccgcaacaacctcaaccccgaatgggacgagattgtctacgtgcctattcgcagctcacgcgagaaggtgactgtggaggtcatggacgaggagactatcaacaaggaccgaactcttggttggtgtgaactcaatgcatccgactttgttcgcgaggcggagagcggtggatatgaaatcgacgacgagaagcaggatatcaccagcggtctcaagatcagcggcggctctcccaagggagaaatcgtctacaatgtctcgttcttcccgtccgtgccagtcgtcaaccccgaggacgaagctgaggaggaagaagaatccactgagcttcctgctactcctggtccggactccaccgaattcccgaagaaggctttgcactcgaagtctgctagcgttgactcgaaggcctcgaaggcctcgaaggctgtgtctaacagcgctgcacccgtaactaacggaactaccaatggcgagcccgctactaacgggcgcaccagtctcgaaaccactacatcccgcccactcacaagtagccagtctgaaaccgcgtctgttcggtcggttaaatccattccccgcactttcgtctctgcggaggatctcccgaaatatggtatgttttgcttcgatattcacgggaatagtacaaagctaattgaccatagaatccggtttcattgtgttcaagttcctcgagggcaagctggccgttccccatgtccagttggaagtattgatggacgattacatgttcccttcatatgtctcatccaagatccatacaacgaccgcacagttcaccgacgtcggcgaggcattcgttcgcgaactcgaattctccaagattacgttgcggctcgtcaacaaggaggatcctaaggactctagcgaggagcacacagtcgccaagctgactggtgacacactgcccacactgatgcgcatgctgtacacgcccaccgagcttatcctccgctccaactccggcgaggtgagcaaggtcaccgtcagcgcccgatacattccgacggaaatgaagctcgacccaacggagagcatcaacaacatgggcaccctgcgcgttgacgtccacgatgccgctgaactacccgccgccgaccgcaacggattcagcgacccattctgcaagttccgcctggacgacgagaccgtgttcaagaccaaagtccagaagaagaccctgcatccagcctggaacgagtacttcgaaacccccatcaaatctcgcatcggcgcaaacttccacgtggatgtgtacgactgggactttggtgataaggccgacttccttggtgctacggcaatcgacctggaatccttggagcctttccaagcgaaggaagtgactctgcccctcgacggcaaatcaggcgcaatccgcctgagcctgctcttcaaacctacctacgtgatccgcgcccgccaaggctcctctaccttctccggcaccttcgccgtccccggaaagatcgtcggtgcgcccgttaaaggtgttggtttcgtcggtggcaacgtcgtccgcggcgcctcattcctaaagcacggcctgatgtcgcgcatccacaaggagaaaggcgaagacaccgcctccattatgaacagcatcgaggaacctgactccgtcaggggcgagcggttgaccccagccgcctccctcgccgaagtctcctcttcccccgccaccccgcagaaggaacacagccgcaaccgcagcaccacctcgcagttcggcgatcgcctcagcgtcttcggtgggggcggctccggtgaaaagggcaccgccaacatcactgtcgtttccgctgctaacttccccaacgactccaatctccgcgtcatcatccgtctccagggttccaagggcgccaaggatgtccacaaaacgaaggctcacaagaacccctctggctcagtcacctacgacgactctttccgcgtccccaacaccaccgccgacgcccagtaccaggttcgtgtcgtcaaccatgccacgttcggctcggacgatgtcctcggcgaagcgccgttcttcgttgacgatcagggttccgtcgccggccaggataaggttattaccgttggtgacggtgtcgttaccattcgctccagctttgcgcttgcagatggtggcttgagacctactacgtcacactcgaccggaccccccgatgccagtgatggtggagggagtcctgattcgaaaaagacgccccgtcgcagcttcttgagtaagagggctgtgagcggtgtctaaatcactcctttactcttattatccgctttggaattcctttgcctgttcatggtgaagagtatatgaaaatatgaattgtttccgcatgttactaattgtgttttgtttgtgcttgttgtgatatccttttcttctcgtttttttcccactcctatcaatatgaattcaattgttgagatggccccggactccttgagacatctaccacgtagtataaaataggcgagtaaaaatagttgagaatcaatagtttgcgccacacaaaaagaccgagaacaagactgagtctgagacctgagactgagtctaagacctgagacatcagtctcaggttggtatcttaaaggggcttccgataaggatatactcgtatttcatgtggtatgcccattgcattctcatggccttatattaaactaagattggtctaaggccttctctgcatcccgagtataatttcccgaacttggtctgcacagcctggatgatctgcactttgatgcttcggcctcttggagtgtttagtgtacccgtaccgtagttagtatgttgtactatgttgtagtgtagtgtagatatagatggtagtggtagggatcgggaatactacataaagatgtctgatattcagcattttatttttagatccagacggagtacggagtatattaacctcatttatttagaagaggcgttgtggagtcgataatttaccgtcccacttgcagttgccactttgactggaagttggtttgcaacatacaatataggaaatactacaacatatgggatgcaattagtactagtctagatgaatttgaatctatatttgctgtactctgtagtaggaattgtgataatagggatccaaggtgaaaattctacctgcattctgtgctttgtactacagacttagcgatattgtatattgtcatataggtcaggtgaacatcatcccgactatgcatctatattctatcttggaatagcacataattaggcgaatcggccgaggtttgttcgaaacaattgaaactgaaacaaaaaaggagaagagcttgtatccggtggggcttgttcctatttgtagggactagctctcctctaaggtggggagggaaaaggggtctggattgttagtggacttgtgtactccgggcttaggggtatagtggatgatgaatggttctgatggcaatcctgtctaactgacacttcctacgcgtaggcttaatagcaacgtgcatgtcggtgctggttcccgagctccagcccgtgggcatgtcagtggctggcaactgacgacatcgggatgtaaggaggactgagcgagataagagaataggaatgggggatgacagtctctagagactctggaggaagagacacagtaggcacagtaggaagaacagagaatgcaggagacgatccgcagattatttatggatgttggcatataaagtggacgtaaatacccaaatcggtgcaaataacaaatacattctagaaatcacggggtctctctcccccactccatctcccttttcttccctctctctttcgtttataacctctggacatcccctctcctccccctcttcatttctgtccttaggaattgatctgtgagttgtcctccatccccgcccaatgacggcagcttgacatccaatggatcgacaaagtggcgaaccccctcctttctgaggcagcttgagttgagcttcttaaatggagccacgttgcccttttcttccttgaatctaccactgaccgtcgatttcctttcacatagccagtttcctccgagtccatacccatatctcataaaccataactcataatggcctctaaggctcttcccactcaccttcgagcccctgtcgaaagcgagggctttggtggaaagcaccatggcaagtcgcagtcgcacatggtaagttctcttcaggcggtgaacccttgaatctccgcatcctgaagcttcgttcttgcctttttggattgttcctgccgtttttgggttgttttgctgcgctttcctgcgctttcctggacgcgtcttgacgaggccacaacatcttcctcttttgctcgtttcctcttctcttcccctcttttcttccctttctcatccatcgctacactgttatcattgctcgattgcttgtattttgagaagccccattcaattgtctctatctatccctttccttatcatggctactttggcccccccatttggtccagagctgacgcgtgaaacctccaaccaggcatttgagaatgcctccactagtgtcgccgcctcgcaaatgcgcaatgccctgaacgccctcggcgacagcgtcaccgaccccaaggagaagaagcgtttcgaagccgagatggacaactttttcgccctgttccgccgtttccttaacgacaaggccaagggaacatccgtcaactgggataagatcgcccctcctcagccttcccaggtggttggctacgatgacctcggtgcggacgcctccgtagagttcctgaacaagctggctgttgtcaagctgaacggtggtcttggtacctccatgggttgcgttggtcccaagtccgtcattgaggtccgtgagggcatgtccttcctcgatctttccgtgcgccagatcgagcaccttaaccgtaccttcaacgttaacgtgcccttcgtcctcatgaactccttcaacaccgatcaggacacccagtccattatcaagaagtacgagggccacaacgtcgacatcatcaccttcaaccagtcgcgctacccccgcatcatcaaggactcgctcctgcccgcccccaagagcttcgactctcccctccaggattggtaccctcccggacacggtgacgttttcgagtccctgtacaactccggaactctcgacaagctgattgagcgtggtatcgagtacatcttcctgtcgaacgccgacaacctcggtgccgtggttgatctccgtatcctgcagcacatggttgactccaaagccgagtacatcatggagttgactgacaagaccaaggctgacgtcaagggcggtaccattattgattccgacggaaaggtccgtctactcgagattgctcaggtgcccaaggagcacgtcaacgagttcaaatccatcaagaagttcaagtacttcaacaccaacaacatctggctgaacgtccaggccatcaagcgtgtcgttgaggagaacgagttggagatggagatcatccctaacgagaaatccattcccgccgataagaagggtgaggccgatcaggctatctaccagctggagaccgccgtcggtgcggccatccgccacttccacaacgcccacggtgtcaacgtgccccgtcgccgcttcttgcccgtcaagacctgctccgatctgctggtcgtcaagtctgacctgtaccgtctcgagcacggccagttggtcatggaccccaaccgcttcggtggtgtccctgtcatcaagctcggttccgacttcaagaaggtctccgacttccagaagcgcattaccagcattcctcgtatcgtcgagctggaccacctcactattaccggaccggttaacctcggccgcaacgtcaccctcaagggaactgttatcattgtcgcctccgagggcagcaccattgacattccccctggatccgtgcttgagaactgcgttgtgcagggtagcctgagaatcctcgagcactagatgttgtcgtctgattcttgtgtcttgcctggtttgcaaacccgtcgcagtctttggtttttctcgttttaacggtgcatccgaggctatggattccacggagtattcaaaggaagtacttgtattacattacaataatccagcgtcttttttctttcttttctattgggttgtttttagtctagacctgactttgattcccaagtactgtgactgttgctccgggccattctcaatgcaccaatacaagcttgttcatctgcaaaagatctctacatgtatgtagataatgtagttgtaattgtatgcctacgcctcggtacttttatccgctatcaattcgatatatggccccaagtagaacacctacacctcatttagcctcgatatcacgaaacccagcttcgaatccgtgcaagacactgcaaacatgaaatcgccattgccttcaggcaaatgaacacctatcataataggcgggggaaagttccccatgatatactcccaacgtcattcgccgcagaataagccctactaaaccgtatcaaagcagagggggatctcaagtaaatcgtcctaccatcattcgaaacaggaatatactttgcaacaatatgcattcctgatcttgtacagtgtcaacattgtttatttgtatattgccaacagtacatatttgactgtatatctgacgcctttttatatattgtttttttttttttttgacatacgcttcttcacatattggacaaatatcctttatatatttgcatcttatatgctacattttacgctcgaaagaaacgcaaacgcaaaaggaaaagcacaccgatatccacctgctcatgtcggtatgagtgggcatcatcgccgtcttgtacccggtccctcgcctgaggaggaggaacatgaccacgacaactaccatgaaaatgatcttgaaaatggcagtccactcaccgaggaaggtaagggttctggtacgtggaagaagagagtttcgactgcgtgtctggcttgtaagaagtcgaagaggaaggtgagatatatgatacactactctacactacatctacacatatggatataacaaccaactaacactctaacgcagtgctccggcacatccccctgcgcaaactgccaaaccttcaaaagagtctgcatcttcgacgaatctctcgaccaacgccgacgcgtagccgcaaaacgcacagcagacgagctctcctaccaccgcgacctcctctccgacctcttcaagctcgtccgcgaagcaaacgaagctgacgccctccatctcctaacgataatccgccacaatgcccccgccgatgaaatccgcgcctacataaacgaaacactcgcctcgatcacgtcaaccactgatacatcaacatccacggcgcacaagcaggaaaccgtcgcgaagctggaggatatgcgccagcttctcaatgtcgagggtacgggtcccactttcagaaggaaggttatggatatccattacctgtgtgactcggcgccttgtgaagtgcctgcggcgccgtggacgagggttactgctgatgcggatctggtgtcgcatcttgtttcgttgtattttgcgtgggattggccgtttgcggctattttggacaaggaggtttttgttaggcatatggcgaagggggtattggggtcggagttttgtagcccgtttttggttaatgcggtgctcagtaatgcttgtgtgggtatttcctttttcactttcttttgctttgaggtttgctaatattcggttgctgatctgtttgtttagtacttctctgagttctccgaggcttatgttgttcctggcgatatctcttcaaaagggagtggttttcttgccgaggcagagaggttgagaggcgaagagaattcgcagcctagtttggcaggtttacaggggacgttgttgatgtatgagaggtttgtatagacatcttgtcctagtggctagggcttttctgacaaagatagatatgcaatgtcccgcgaagacgatctgggctatatcatgctgcaccaggctatccaaatgggcgaggcactgggtctggtcggcagcacaggacctagaatagcttcggcggagttatcccaagacatggatatctcatgcaagcgcacagcttggggtttgttcaacgtcgacacgtgagtgaatactgctagcatcccacccttcgaactcacactcacacctgcagcatggtccacacatccttcctgcgcccaagtctcatcgatcacgtcaacatggcccgtctggatatcaaccagcccgaagacaaagccctctggcagccatacccaacccatcgcgacccgcgcctgtcattcttcagtcagtacttcgacgaagcatgcaacctgtcaacgatcgcacgcgatatctcccgcaacatgttcgcagaccacaggagcaagactggcctcggccctatccaccgccagagccgcgaggatctgtacgaccgtatccgtcgttggcacgatcttctcccggaggactttgatgtgcggtataggccggctccgcatattatcttgttgaagtgagtagcatgtccacattaatccgtcttgtctaccgaaaaaaaaaagcaaaaatactcatcctacacagaatgcgctaccacgccctcatcataaatctcttcagctgcatttccgaagatgaagtcccgcccacacccttcgagcccaaaacaccggaaagcccgccgcgccatactcccgagagaaaatataacgcgcgggaagtaacgcagagcgcggcccgcggcatcgctgccctaacgcgtctccacagacgtgagttcggggttagccgcgcgcaccagtttgcgatgtatgcgatcaacctggcgctgtttacgctgctcgagcaagactcgtttgatgtgctggatgaggatttcctcattctttcgagtgcattctcggttgttgcgagtcgatccgcgctggggaggaatctgtttcatattttccgacagtcggtcagggcgaaggcgcagggctatcgtattcgggagagttctgtgcctgatgagttgaaggatttgtttgacgaggcctcgaaggaaagggggtgtgatcgatttgatgagtatgctgatggacttgagaagttaaatcagaaggaaaagtatcatgggattggagatgggaatggtaaagggttgcaggattatcctggacttggactttccgatatgttggatcgatatgagagtctgagtcttgggaaggatgatgttctggttgagaggtatcgacctgttggatgttgatgggagaccgcacgatgcactatcctcggcatcctcgtcatctcggtcgtatgtctccaggcacatttgccttcacagagtggcgacacggttgtatgaatttgctccatagatatagatcgtccagataagttgataagttcagggggatgtataagctgacaccaaggaggaacaccatagaatgcgacagttaccgacacgtcacagctaattatggagtctcagatccccaagagttcataggtaggagttggttgacttggaggttggctgaggttgggatgttgtctgacgtcaaatcggcagttcatccacccgccaagtgaatgtcatctccacgctcgtccactttagtccaacttcgccccagttgagatatttgacagttaaaacattggaaacaaatcatcaatccttgttttcctgtttgtgctggaatgtttttgccatggctttgttccgcctttcttaccttgtaccctccctcttcaaccctcggtaacatatattcgtgtcaataatctcgataaatttgataaatttgatatggataatcatgacctaactctcgaggactacgtctcgatgtcatccgtacctggttatatacttccacaaccctatcctacgcctatccctttctcgccaatacaatacgccttctcacagcatatgtcaaccccgtcagcatccggaagtactgctccaaaggtagccattcctagactgacgggttctgatacctttatacacgggcgccgacgggcagcgcgggcctgtcagccctgtcgccagcgcaagatcaaatgtgatggtatccgcccgtcgtgcggacaatgtgcatatcacaattacggctgcaactacgaggaagtcaaacgagtgcgggatcagaaacaactaggctccttggccaagcgagtggatacatatgaagctcttctgagagacctcgaagccgaggtggacccccccacagctcgaaaaatcaaaaaagcattgaaggtatgtccagtcaatatcagatgaagttgcgggtctcacccaagactcggatcttatgatttgagtcccgagttcacgactctgaccgtttgccatttggcaaattaagtccaaaggtgtgaaaacccctagaaagagtttcgactccgatgattcctctacctctatggactcactcgatgctatcgaccaggttgacgaagacctcgatcggaacgcggacacccgggctgcgggcttctttgggaagaattcagaggtcaattggattcgcaagctggagagcggcgtggatatgaagagcgcacaggaacatgtggcgaatcattctcaaacgcaaagtgatcgtgatccagcctttatgcagcagcaacagtcattggaaaggcagattcccacttctacgatggattatcatctcgacaatttggacattccgatgattgaaccatgtgacccattagctttgcccccgtcggcattggcagaccgatacttcgatgcctatctgaccaacgttcatccgacattcagcgcagttcggaagatgaccttcatctcccagtatcagaagtttttcaacaatgaatcgacaccacaccggaaatggctggccattctcaacatgatatttgctattggttgtcgctactctcgactcataaatgacccccaaagcactagtgaggaggacctgatatacctgacccgggcacgccatctcggtctgcagggcagtgtgctattcgagcccactgacctccagcagatccaactcgaactcctcatagcaatttacatgctttgtctgggacaggtcaaccggtaggttcaatcctttcaccctccattccttctgcatcatactaattccctcatctcccccagagcatccaaattctccaacatggccctccactcagctatatctctcggcatcaacctctgcataacagacgaccgcaccaaagaagccgccaaagaaactcgcggccgactctggtggtccatatactccctcgagcaccttcttgcatcaatgaacggccgggcctcctgtgtcggcgaaggcctctgctccgtccctgcacctcttccgtacgaagaagaaatattcgatcaatccgacgctaaacgcctcctccaagatccggccctccgcgaagcccaactccgctccaccattttcgaaagtcccagccaacaccactcgccctcattggtgacctcctgtctaccctgtccatccctcttcttcaacttccttgtcgacctaaccctcatcacccacgccctcatcaacaaagtctacagtatcaggggtctccgcaaaggcccgagccagttagaataccacgtccaaaaatccagcctacaaatggaccgctggctctcaaaactttcccccttctacgaattcaccattccaagctccgatccctggcacctaaagcacccccaactagacgacctctccgcgcccttcgtgcgcgaacgcgtctgtctagcaatgaactattactccgcccgaatcaccctttgcagaccatgtctaagccatatccaccaatctccccgccacgtctcaccaacaggcgatcacgctgcgcgcgaaaaagcgcggtccgaaagggccacacactgtctgcaagcttcctgcgcactgatctccatcttcccagaagatccgaacattgcatggctggcccgcaccacgccctggtggagcattctgcatttcctcatgcaggcgactacggctatattgctgggtttgtcatgctgttctgactcaaatacgcccaccagcccggaccatgcggatccgctcctgacacctgttacgccgtctatatcccagaccggggcttactcgccgctgctggagaaggatttgactacggctgttgcggcgactaagaaggccctcgcttggcttcatatgactgcttctgtggatccgtcggcacgacgggcatttctgctttgtgatgggattgttagaaagattgcacctggcttggggattgatttgacggagtggccggatgggagttcttttgagaggttgatggaggagaaggagataagtggacatgggaattggaatgtagatagtagcggaagcaatgagcaccacagtgggagtgggatggaggcgtatgatgagttggttgatttcgacggaggtgttttttagtttagtttgagcgtgatgtcacttttatatctggatatacgatgagaatatgattgatgaacaaatgtctacacctaatatatccatatgccactttaagccgacgctagcaggcagtcattgagaggcgcatgttcaaagttttagcatcctggacggatgatgctagaatcgctcttaatatcaagtcacagtcacggagcgactatctggctagtaaggattgggaggcaaagaagcaaccggtaacttggtctgagaataaacggacctaagccaagtggattacgagcagcaggaccccaagcttgaacttgaggcacgggaatgacagtgctagtacggatgagattcagcgcagtcacttccatagcgaccttctcgtcggcatagtcattaagtgccatccccacacaaaggaaacgaaccatccaggtagtattatcgctaaagaccatcttcataccggcattgaatgcgccatggtgaaaggtaccgtcaagctggcagggaagcttatcaggatggaaagttgatacccattgacagagatgactcattctgtaggtttcattcaccctgtcaacccaaatctggccttgcacctcgtggacgatatcaataagcgcgtttgtatccatgacatcaagcaagtttgagggttgagacgagtacgagcaccggacaagtcaccgctaatttagcatgaaggaaatcatattaatccgtgttaatccgctttttgacattccatctgctcagagggtcttgtcgaatgtcgagatctctcatttacgctagttagttagttagttaacgtaatcggtaagcgagtggccactgtaagcgagtggccaccccacccaagaggatatgatcttatgccctgtctttccacacccactacaccttggtgcagcccgtggtcgtggttctaaccctgattgagtgcttccgcccggggggtgtaggggtatttctaatgcttccaccagcctagcaatgatttcagaagcttcttgaactgagaggccttcttcggcgggtatctgccgtctagatcgggcccgcttttgcttcttattctcattttcatcccgtaaatccttgttttctttcgctagtaaaatagcgctatgcattgcaagctcgcagcctttgataagttggtttaatgcacgtttagaagggcttattaggcttcgagattgggttcgaagtaaagctttaatagacaaagcctgtcgacgtagatctttgctattaaaaggggtttttggggtgaaattccggcttaaatcgctaccccggcttagggggggggttagcgttcgaagataaatattgagttttgaaagtacccgatcgggtaaaaaaggtattaaaccagctgctgagaagctatttttaatcgtctccgatttaaaagcttcaattcgtacagaggggtatacttcgaggaattcaagtttattaatatagttgatcccagtctgcattttcatctcaactaaccggctgtacgaccgttttaccaccgcaaaacaactgatatcgagaggttataaaaggtgagaggaatacagtggtatacaaattggtataatatcgttttccttataaatttaatcgaattaaggggttaaatggcttctgtagccattgagtactaaaagtcgataccttcctactatacgcaataaagttaatagtataaagagtttctaaagccagcgaagtccaatttcatctaatatccacctatttggactaacttcaaagcgccagttactaggaaggccttcgaaccataatttaaggaagaccttacctttaaaaataatatatagagggaggacctatcctaccgcgtttatacatttaattgcagttacctactcgcgatttctaggttgtaaaagtaatctccaactgtagtatttacttcttattataacctttgccgttatagttaatcctattataaatccagtctcatcgaagttataaatatcatctaggttaatcccaaattaaataatagttttttaaataagattaaactattctccaatgatttttaggtctttacacttcgcgcgcttataattataacatcttaagaaccgagaggaaagaagagggcgttgttttatgaaattgtaaacctatttttcgctaaccaaaatgactagggtagttccgcgctttttaagaagaagattcgccatttcttataccatagagggccggggagctgatccacgagaatccatagagagaatccatttttgaagagattcctcttcaattgtagtcaatttagtcgagttggcgcgagaagtcgcgcggcattgtattccatcgaggcggcgccgaagggttgaacgcgggacgttaaaggtacgggcggcaatagaaatattggtaaattcttgtttcttaaaagcctggatagctagtaagatcctaccctcctgctctattgaatctttagaggattgagagcgaattggtggcatggtgggtggttgaactaagtaagtgctaattcatggacgcgtttttgggtagggtggccacccgcttaccgtggccactcgctttccgannnnnnnnnnnnnnnnnnnnnnnnnnnnnnnnnnnnnnnnnnnnnnnnnnnnnnnnnnnnnnnnnnnnnnnnnnnnnnnnnnnnnnnnnnnnnnnnnnnnnnnnnnnnnnnnnnnnnnnnnnnnnnnnnnnnnnnnnnnnnnnnnnnnnnnnnnnnnnnnnnnnnnnnnnnnnnnnnnnnnnnnnnnnnnnnnnnnnnnnnnnnnnnnnnnnnnnnnnnnnnnnnnnnnnnnnnnnnnnnnnnnnnnnnnnnnnnnnnnnnnnnnnnnnnnnnnnnnnnnnnnnnnnnnnnnnnnnnnnnnnnnnnnnnnnnnnnnnnnnnnnnnnnnnnnnnnnnnnnnnnnnnnacctattttaataccgtaaaacagccgatattaagtagttataaaaggtaagaggaatacagtagtatataaattagtataatatcgttttccttataaatttaatcgaattgaggggttaaatggcttctatagctatcgagtactaaaagtcgatacctttctactatatataataaagttgatagtataaagagtttctaaagctagcgaagtccaatttcatctgatatctatctatttagactaactttaaagtgctagttactaggaaggccttcgaaccataatttaaggaagaccttacctttaaaaataatacacggagggaggacccatcccgccgcgtttatacattcaattgcagttacccactcgcgatttctaggttataaaagtgatctccgaccgtagtattcacttcttattataacctttaccgttacaattaatcccattgcaaatccggtcttatcgaagttataaatatcgtctgggtcaatcccaaattgaataatagttttttgaacaagattaaaccattctccaatgatttttgggtcttcacacttcgcgcgctcataattataacgtcttgagaaccgagaggaaagaagagggcgtcgttttataaaattgtaaacccatttttcgccaaccaaaatgactagggtagttccgcgcttttcaagaagaagattcgccatttcttataccatagagggccggggagctgatccacgagaatccatagagagaatccatttttgaagagattcctcttcaattgtagtcaatttagtcgagttggcgcgagaagtcgcgcggcattgtattccatcgaggcggcgccgaagggttgaacgcgggacgttaaaggtacgggcggcaatagaaatattggtaaattcttgtttcttaaaagcctggatagctagtaagatcctaccctcctgctctattgaatctttagaggattgagagcgaattggtggcatggtgggtggttgaactaagtaagtgctaattcatggacgcgtttttgggtagggtggccacccgcttaccgtggccactcgctttccgaatccatatggtggagaagaacgccgatttcacggagggtatcatagtcataagagacctggcttttcgattctagccattccaagatggagtcggccttttcttcgaacatttttctcagggcatcatggtcctgcagcataggcggattgacaggttgagaagacatgatagacggcgtggaaacgcgacgagattggttgacagtgttatgaaaatgatgaagagacgaagaaacgtggagatgtggagatagagaggtggaaagctggaaagctggagagctggaataagtctaggaactataatgcctctgggcggaaatgggttagtgtgtcaccgtgacccactctcacgtggaccacctaggcagcctgtttccagcttactcagcgtaccgtccacccgtggacccagctcaagggaccgggcttacagctgatcgaatgttagaatgggaccgctaatttagcgtgaaggaaaatatattaatccgtgttaatccgcgtttcgaccatctatctgctcagaggggtcttagcgaatgtcgagatctctctttacactaggatgtcttcatagcttataatagacgttcataaagaccccgtgatcattatttacagtattatctttaccactaaatcctatcttcttctgtactagtgtattataacccctgtcgatttttttaggcggattttcatactgtcctatcttatactctacatatatccagtataaagaaacctttctttaaccctccggcttttgcactttgcccaggacagctacctcaaccattcccagcacgttataaaggagcaccagagcggccaagaacactttcacctgaccattacactcatctttagagggagattaatcctaacactatacccccgctagggatcctcgctgatataaatataataataccacctaatatcttagcccaataggcggataatcaatcagaagattctaccgaagatctgaatctcctagtacaagatactacaaataccctcgaggctccctagacccccttggtcacagctgagccactatggttactatataggagcctcgagtgtatttgtagtatgtcgtactaggagatcaagatcttcggtagatacagaattatccggaagcggtggacagcaggcactaaggcggtgtacagaccatccattgagagaatcagtacggagtagcatgaacaaaagaaaagaaatcaacaatgtctcttctatacagtctgtgaagcgagcggagtactccctgaacaagggggctattcccactattcatggctattattgtatgcacctaaccgtgtagaggttaaacaaggctagttgtgcacacttgacaaaatgacagctgagtccgagcaccgggggaatacaacttgagtgagtgattgagctgcatcatacggagtacagaatacatacacacttgtctacggggaaagacacctgctaattggctataccctatataagatttacaggggctggggtcggtggctacctgactgcccaaggccaggcctgccccaccgttccttgctacatagatattattcaatgcctgcatgaccttcgccattcttgaagtgtttgccaatttttaggtaattacaaggcgtgaactagatctccgttaagcgattcggcaaacttggcccaaattgccatgtgatatagagagtactagatatctcgtatacgggatcttcggtcacatcatccacagctctttgctttttcctatagctggtgttgatctgtctctgaactcagctcgccactgctcatgggtatggtagtgcatagtgatcacccttcacttagttttacgttatcataatttgtgaaatctatagatggccagttttctagaagtcaatgaccaaccccagtggtagctatgcactgtgacacatggggaaccccagctgcatgatcttcttgcgcagatacacacagtgccaaaactttcgtgacctgcttagtcgataaaagtgagacacgcaagaatgaacgaagaaatagagctgacgagtatagcccgagttatggggagctgaagaaaagatgtgcagctgaatgagccaataaacatgcacagtgacaaaacgaagacatcgggattcgacctacttagagttgcacagcagaaaaggaaaggaaagtgtgcatgtattgtcgatcatattatatacggagaactccgtgtagaatacagctgcatctaatttaaaccatatgcatgatgcacgaaaaagaaatccacatgaaggcaagagaagctgaacccttgtaatactccccctatttgaactccgtatatttacttgaataggacctatttatttggccttggaacgccttctacagatatccttcttctattcatcatccttcatcatggtgccctcaatcactaggctcgaacatgtgtcttctatcatacctatcaacaccttgaagctacccaagaaagctccctctcacacacaagactccgtcgatcttcctcttactctttgcgaatcgcatatactcgaggctgccaactcccagtacttggaatacctggatccagaactagctcggggtcttgacattgagtcaattctcgttgtttgctggttacttgtggtacatggtttctctcctgtgagaaccatgtacctagagttccatcctggctcaaatctgtgctatatagatggcaaatgtcaagggactgattcgcacgctcttggattttccgtggagcgtccattgaaggacctcgttcgagacttctgtcttatcaaggcaggcatcaactcgggcgaccctgatgaagggtgggcttccgatgataagaatcaccttctcacctcggctgtccgctatggtggtgaccgtccaaatttggaaaaggcacctttgtctgccaattcaaaggtaccgtttccatatcctcactcaatccccccgtaccctagcaaagctaatctcatctcggtctagatccccaatccaaagctgatgctcaacgtgacaaatgacaatggcaagctgcacgcaagtcttgccttctcgtcgcccgagatgtcgaaagaattcgcaacaagccttcttcactccttgaacaaggtcgtcgcatccatataccattcacccgaaacttctttgggcgaccttgatctatgctccgaccttgacctcattctcctgcaaaagtttacgagggaggtttcggactctcatgagatcttgttacatgacatggcattggagcatgcgcgactgaccccggatgcgcccgcaatctgttcctgggatggaaacttcacctatagagagttggataacctcacatctcgtcttgctctttacttgaccgggcttggcgttggccctgaaattttcgtgcttagttgtttcgaaaagtcatctttggcgattatcgctcgcctggctatattgaaggccggcggggcatacatatccatcgacgccagcgaccctcccatattcctggactcggttatcagtcgcgttaatgctaaaatcatgctcacatcctcggagtatgcatcaaaatatgcctcacttgtctcaaacgtcatctcgattacagaagacatgctgaaagagcttcccacaggacctctggcttccacagtccaacctcataatgcctgtctggttttgttcacctctggaagcacaggacagcctaagggcattatccaagaacatcggtcttacgccacagcaatccgcgactacaacaaggtcctcgggctaggccaacacagccgtgtatttcagttcgatgactatgcattcgacatcagtaacaacgattacctcacagctttggctgccggtggctgttgttgtgtccccacacctgaaaaaagcatagctgctctgattgaaaatatcaatatcaccaacaccaatatgagcttcctgactccaacaattgccgtccaactcagccccaaagacgtcccgtcgctggagctgctttgtatcggcggcgagcccatgtcaaatgatctcctcatgaaatggggacctcatgtgaagctggtaaatcagtacgggatgggcgaggcggccaccttctgcgcgtacaacgacaaccccaaggcaggccataatgccgtcgtcggaaaatccggtagcggcgctatttggattgccaatccctcctcgtctgagcggccagttcctatcggcgctgttggcgagatcttgattgaaggcccacatctcgcccgtgggtacttggatgacctctgccagaaacccgacgtgggattccttagcacagtgcctcggtggattgccgatctccacccgtcgcgagcgccgacctcgcgcatctatcggtctggtgatctgggtcgatatcgccacgatggtactgtggagcacatgggcagaaaggacacacttcttaagctcaacggtggccgtgttgagtcaaccgaagtcgaatacgtccttcggaagaccctttcgcctggcgattttaccgtcgtcgatatgctcggtgagattgacggtggcgatagccccatcctcgtcgcttttatctacttgctggataacccagcaaaccttcttccgggaatctcagatcaggaaatgtcgttccttcccattacaaatcgtgtccgagtgaacggcttggtggaggcgatgcagaatgaagtctatagcacgctgccaaaacacatgatgcccagcttgtttctccttgtcgatcgaatcccacgtacaaggtccaacaagcttgatcgcagaaagttgcatcaaatcgcccaaaagtggtatatggggaacccatgtctgtaaagtgataagcactgtttttcatccttctgatttattttctcttctttttcgatctggttcatgtgcaagctggggcagatgttgactcgcggcggtttggtgtctactcattatttaatcacatccatagcggcgggtttcctaaaataaaaccgtggtcttattgagcgtcaggtcctcagactctagatatacgtgagtttctctataagggcctgtctacaccatccaagatttgagaacgcgctctcatacaaccttggaagcggtggcagtggagatcatagtacatagagttgacacaggtacatacagtaggtaatcagtgtatgcatgcgtagtgataaactaagaactgctcctataagaaaatacagttcatgttaaggaaccacgtgtaagttaaacagggctagtggtgcacatttgacaaaatgagattagaaccgagtatgtactaaattgagaacattagatatatgagaaaaggaaaaaaagaaaaagaaaaccatgggctaagtgaacaatagagggaaacaggaaatgcctgaaatgccaatgacacaaaagcgcgcaacaccataagaggcccacgaaacgacctgatatacgagacttcgtggacgtaaaaagatcgataaaacacacatgacagaaccgaagaatgatataaacaccgatgttgtttagaatgaaattcaaatcagaatatactaggtagaggagaaactgatcttgcattaaatggatgaaaaccatatcctgaaccatttcagcactaggttggttgcggttgcatctggacctggaaggtatgctgatgttcatgctgtggtgcgggcgggggaggggcttggctccgctgtggaattggtggtctgcgtgattgtcctggtatcccgtggacaggggactcagacatcgggtgttgcatatgttgttgcatcggagattgaagatagggctgatgaggaagaggccgtggagggtggacaggagaatgatgatgcatttgcatgtgtggcatagagagcggctggccaggctgctggggcagggattggctgtgcggcaagtgagaaccgggttgtgcagacatgtgttggttctgttgctggtgcatgtgctggacttgcggctgcccaatatgctgatttgcctgcgcctgtgaaggctgattctgttggaacatatggaggttctgctgttgcggcagagactggccttgaagcatctgcgttggtgtcgggcagtgccgcttgcgcgactcttcatcgattgaagaggttgcacggttcagtatcgtcgttgtatctgcaccctcgcgcaattgagagttgacctctgcttgcgtctgatctccactagccgcggcagcggctggcgctgccggcctcnnnnnnnnnnnnnnnnnnnnnnnnnnnnnnnnnnnnnnnnnnnnnnnnnnnnnnnnnnnnnnnnnnnnnnnnnnnnnnnnnnnnnnnnnnnnnnnnnnnnnnnnnnnnnnnnnnnnnnnnnnnnnnnnnnnnnnnnnnnnnnnnnnnnnnnnnnnnnnnnnnnnnnnnnnnnnnnnnnnnnnnnnnnnnnnnnnnnnnnnnnnnnnnnnnnnnnnnnnnnnnnnnnnnnnnnnnnnnnnnnnnnnnnnnnnnnnnnnnnnnnnnnnnnnnnnnnnnnnnnnnnnnnnnnnnnnnnnnnnnnnnnnnnnnnnnnnnnnnnnnnnnnnnnnnnnnnnnnnnnnnnnnnnnnnnnnnnnnnnnnnnnnnnnnnnnnnnnnnnnnnnnnnnnnnnnnnnnnnnnnnnnnnnnnnnnnnnnnnnnnnnnnnnnnnnnnnnnnnnnnnnnnnnnnnncgctcttccgatctaggccgcccacgtggtcggcccgtgccaggtgcctttggtttggctgaagctggcttccttggtttagggggtggtaaaggttgacccgttgcagctgcccatgcaatttgatcagccttacgaggacgtccacgttttcgcttcagcggagtgccgtccggtcccagaataggcgttcccttgattgtgctattcggtgcggtggagcctggagcggtcggtgtcatattcgcagtgaatgaagcctgtcctggctgaggaactcccggcatagactcgccgttttgggcagcctgtgcggcctgcgcagcaagcctagccgcaacttcctccttcctaggccgtccccgacgacgcttcaaaggcggagtggcaatctggtcacctccaactgtggccacagcgggcatctgcccttgtccgttggtctgtgtggggacagcgctaggaacagtcatggaggcatttagctgaggttggacatgaggctgggattgggtctgaacagcttgaggttgaggcggaggagccttcttggtcttggctttcttcttcggtgcaggactcgactcgtcaggctgtatgaccggactttcagtgactgcagagataaccggtgcagctggctgcgatgaagacacggcagctgagtgtggtccctggtaatgctggaactgagcctggtgcggagatggttgaaattgggtctgctgcggctgagaaaattgcgtctggtgtggggcgtactgatgttgcgattgaacttggtggtgctgatattgagatgggtggaatggaggctgagtgtgttgggaaaacggtgattgttgttggtacgggttgtgcgcctgactttggtgctgcaatttttgcaatctctgctggtccagttgctgcttctgctggtgctcaagccgctgctgttccagccgttgctgatgctgtttctgttgctcgagcctctgttgctctaggcgttgttgctgctggtgctgctccaatatcttttgctcgtctagcttttgctgctccaattccttctgttgctcaagccgctgctgctgttccaagcgctgctgctggatttgcttttgctgctccatcctttgctgttccattctttgctgctgctctagtcgttgctgctggaactgctgctgttgaatctgctgttgcagctgttggtgtgtttgctgaggtgactgcggctgtgactgcggctgtgcctgtcgctgttgatttaaagcaaacatagacgggctagccatagacggactagcagaggtatggttatccctctgttgcatgcctgcgtgaggtagtctgttcatcgcctgctgtggcgaaggaacactcatggggtgtccatgagtgaggccggttgtccctggctgcggccgaaggtgggccattggattaaacccacgctgcaggttctgcagcgccatagggtctgggttgcgagacataagatccggggagctctgcgccgtaaattgccccgggaattggccataactgctgctagtggggtagccacccaatgaccccgatgtcggggtcatcttacgcatatctggagattgcgacgcagcgaagttctgctgaggttggccccgaaaaattggcttgttgcccgggaagggactgccatgctgtggcagcggcggccccgcacctagtaagggcgattgggcatgctggcgttgaggctgtggacctaacggatgttggggctgaacaccttgatgttgttgctgctgagactgctgcggctgttgagggtgaaattggtgaccaccgtagttcatcatcttgagtcaattttagagatgcgctggcacttggccgtaagcggcagagaatggagtgatcctttccaaccgcgaagcatgcaagggcgagaacggtcaaaataatcgcgtactagcttgaaaaggaaatgtagaatatagaaaggcagttttaaatcaagactcgtcaccgatatgcgccagcgctgctgataattctatacggggaatcaccacctgagtcgcgccgaggccgcgtgtttgtttgttccctggcggctgaggccacaaggcaacaaggcaacaaggcaataaagcgaccgcgcaccggttcccaattgggtttagcggctacggagaccgagacaagtcggtcagcgcactttgagaaaatgagtcgacggtcgctcaaagggatccagggggggagaccagctggggggatccagagagacagcgaaggtgatccaaatctatttgctagaggccttaacggatgtcagggcctagcagaagtagattggagatgaagtggatgacgctgggctggaatcctcgatggcgagggaaaaaaacattaaaaaataaaataaaaaataaaaaaaagaaattgggaaaaaacggaattttcagattctcctctccacatcacgtgaccccgaggctgccatagtgtggccgtgttcaactacactctctacccaaggtgagttggatagtctattcatcatctcgagctgtggaggtgtgaggtttgggatttcgaaacacctgaaccttcgtttgtctccttcactcctcaatcctcactcacacactcggccatctgcttatcttccgcaatccttgcaaagtatagaaccacaccactcacaagtactacacaaagtacgtgctacctgaaaagtatggagacatcatgctgtttcctaacatccttgtcctctgctacccggagatctgccaaatagggcgaaaagaaccttgaaacaaacccctttcaatgtgccaatactgacgaagatccacaatgcaaaccacaaatcaggagcagatctgcacaaaattagccgagcactataatatatgttgtatgaatatatctttgatcttgtctttctgagaatattcaagaaaccgatagacggtcttttctatctttcctattctgacgaaagtagcctctggaggtgtaaacatgtgtaaaaagaaaaaccgataaacggcgcctcttttgtaaatacacatgaaattatggaagcgacagaaaaaaaaggctctaaaatgtgcattgaaaaaaactaggacatgtatatatgatcaagtttcaaggtacagaagtaatccctggacagattacaaccctatctgctctgccgcaacatagtcttcccagaccttcttaatgtcattttgataaatgaaatccttgtctccatagagaaaattgtcgattttggctttcagaatgacatcaaaatctttctcttctgcttggagttgttctgctttgtcacgtatttcgtctagatgctgatacctgcaaatggtcggaaaagcggcgtcagacaagccattttgcgcacgctttcaagtttgaacttacatcttggcatagtatggagaccggatctgttcaaagatctctagagcgtctcgtgtagggcgagaagtagcctgcgtaaactcaagcgcccgtgcgaggatccaaccatcctccatggcaaacgtcgccccagatccgaacgcccctggaaggctgttagcacttgacattataaccttaaatgataacacatgaacttacctgaaagcgggtgactggcatctccaatcagggcgactttatcccagtcggtgatcttgtttagacgaggcccagcgaatgttgcaaactccctccattctccttcaggaaccgcgcttactgcgtctcttattctttggtcaaaagcctgtttatatgttagcagtgagtcttttttttcagcaaagtttctcgcacctcaacacgggatcccactttctcgttggttgcagggataccccagaagaccgtcttccctgagacctcaggctcacgataggatcgaacagtgatttcaaaaagcggatctttggactctgcctcatcgtccacatcagagaggtatacatggccagcttcaccccaccaccatgaggttgtagtcgtgatgtccgggatgtgggccagacgagacttcggaattagaacacggaacgcactgttacctgtaaagtgcagtcgatgatcaggcaatagggccctacggacaacctatctcatgaaggtccgtcagtcacacatgccagttttatcacaagaggctcgacgaacagagtgtattccgtccgccccaacgacaatgtccgcaatcgcttccgtttcatcctgaaataccaaccgaaccccccgacccgaaaggttctccaaagatacaacctttttgccaaattggatcaagccctcgggtactctcgataagagagctgactgaagtcgggttctgcgagcacggattgatccgcgggaatcagcagcggaattttctggatgctcagtgatgttcaaaatcttccctgtgtaggcatttcttccaagaattgaaagttaacatatgcatttgttgttactgtgtccaggaaagcatcgcttacctttggtgtgtgttggatttggagcctcccttgacgccatcactagctccaagtaaatctagaactctccatgcatttgtgctcaggctgaggcctgcaccggcttctcggggctccgtatttttctcatacagagtcacctttagaaacggcagttctgagagagcaatcgccgtacctaatccaccgggcccgccaccaatgatggcaaccgatgtcaatgcttgtccgaccatatttgcgaaataattgtatgtttagatgtggtggtttccgaatgttgggaattttgtcttgcttatatatccaaagtattgcatctcgcggtcggcgctggccggtagataactccatcgcacgccatactaagtctcgaatgtgccatacggcactagtatgatactgcccaccaatcccacgacaacggattaagaatcagaccccgcgcgtggattgtcatagaatatttcgatttggcacgtgctggcttgttggtgagtcgatcagaccatctccttagttgcaagtcaagggaatagcgttggcccgttgagagaagaggataccacctcaaagccaattgaccccttatcatggatcactgatgtctagctattagtcttagtgagaattgtcaccccggtctctagcctgctatggagagatcaaggttgaggaatacgacctcggaccttctcccatacaaggtacatgatataaccccggggataaggtcgttcgagtcttgcttatcaaccgtatatcgaaggagtctagtagtagcagtgtacctattctctataaacatcttcaagaccaatgatgatatgcatgttctactctatccctaatatagatctcagatctcaagcttgccacatagcaaatctccggttccagggaggctgccgacatccccaaagtgaaggaatgaggcgactttaactttgtatcgtttttcatggtcataaactccccgatttgggaagagacctttcacatcataccgaatgatgatctcgaatgtacaaaaagcagaaatgccaagtcgtgagatactcctcgatgggatagtacttctggatagtacccagaaaagtatcatatgtcacagatgtctagggcttgatatatcaatcggacgttctgattgttgttatgatcttttggcctggaggtactggaggtcaggtgcagcttgagtacccgcaacgcgttgtaatcacgtgaaccttggcactcgttcccgcccaaacgtaaacaaccgactcaacctaatataccccgattcacaccttatggcagctacataacaccgctagggggggggggggggggggggggnnnnnnnnnnnnnnnnnnnnnnnnnnnnnnnnnnnnnnnnnnnnnnnnnnnnnnnnnnnnnnnnnnnnnnnnnnnnnnnnnnnnnnnnnnnnnnnnnnnnnnnnnnnnnnnnnnnnnnnnnnnnnnnnnnnnnnnnnnnnnnnnncggggggggggggggggggtgggtgggagggtttatgagcccccattaactccttcgcgacatggagaaaagctttcctcaacaatcacccaggtcatcgtcgagtcctcgacatcatcgagccggccagcgatcaagcacttgaacagcggttccatcttagctattatgctagatttatgcgaatgctggatactgatgaaattcttcaatgttatgtggaagacaaggtccagtggattggctccaccagctcactcacctcatttcttgcttactcaaatcatcgaaaagatagttacgattatcatccaagcctttcccgtctatctgcccgaatgcctgccgagccctcttcataagaacttcttcgcagagttggtttgggaaatatcaagtcaattaagggtgcttcaaaggcgtgacgagctcgcagaatacgtcgaagaagcgaaagttccctctgtttcctcggcgattggtcctcccggttgaattgcatcaaatacatgccgaataatttcaactcaaagtctataagtacaccaattcggactgcgatactgttgacaatctccgcaagcgtggtatccgcattaatgctgtcggtcttaagtcccactttgttgtcggccagacgccatcgcttgccgatcagctcgctactaagaaggcttacatcaaggctgatttggatgttattatcacaggacttgatattcgcttcgcggaggagccatactatactgctaacatgcaggaacagcaggccgcggactactacctctttgttcaacgctgtcttcaggctggacatagctgcctgtcatgataccctcaaggctgaacaggcgtattgccccgttgttgaggtgtgcaaggtaataagtgcactttttgttggcctattggtactgggtcatatttgagaggagaccttgaactttgtaaagagaacctaatttgacttttacaaatacttttaaaaagttcgcgtcaccgggcggataatttggatatctcataactcttaagcaccatttatcctagtctagagttgatcttgtgcctgtgcttttgcaatcgctcctggggcagcaggcatgagtgcacctagaggtggctggttcttccctttgaactcatcgcacatttgttcgaatgtaacccactccactccctcatgactattgatatattcaatgagcctgcatatattgcattagtctcacgttggccaacggtccttgggtgtatgaatatgaacgtacctttcgtgcatgagcaaaacatggggccgacctgagacatcgggatgaatcgtcatggggaagacaaactcgtcgtattctcgatagaaatagtcgaagtgatcctgtattaaaagaaccacgtcagaccaaattctcctggttctggatgtaggtagagactaaccttccaaatatcctcaacatcacgcggattaacccatccatggctattcgccgaattcttgataaacatcatcggcggcaaatcatcaatataccaactgccaggtatctccacaagtccagtagtattgcccctgacgagtggtttcatccacatctccgccttctgcttgtagtcaattttcgtccatgtatccccagtccgcagccagtacatctgacaatcctcatgggacatggaatgatcatattcaattccataagcgagcaagagctcaaccatctctgcactagcctcccaccacggcgcgacaattccgcgtggtggctttccgcagaactcagtcaacatcttatatgtcttgtcgaggatgtcgcgctgttgctccgtagacaagtcacaggggttttcatgcgagtagccgtgcaacccgatctcgtggcctgcgtcccggaccatagcacattcttctggaaaggtgtctagggtgtgacctgggatgaaccatgttgctttgatattgtatttttcgaaaagcttcagcacgcgcggtgtgccgatgtgtcctgcccagagacctgatttttatgagttttgtcgatgtgagagtgacgatctcaatgacacattagcttacctcgactgatatcgctcacgctatcctcgcctccgtatgagcctagccagccagctactgcgtcgatgtcaacaccgtagccgacaagaactcgctttttgcccatggtgattgggtttgatttattgctgatgacagggaggttgaggctaagattaagaaaaataatgggaaattgattggaatcaggtgtaggcgaggttttgttgatggaaatatatatggttctctacccccaaccatgcaccacgacagacaaaggtggggtgatccctaaaggcgttcaatcggattttgtcgtattgaaaatatcttcatgttatggatagctatttatcttgatcccactcatgattgactccgactaccccacttgaggtcgtctgctctagcttgtgatctatcaccaccatgacttgttctggtatagttacaataggccgacatggatccatggatatgtgcctgcaagtttttaaccagtcctcaatagggattttgctacctggcgttaactctaaattgatcgcacacctttgtcgtcatttcccccttcatttcctgtcatcttccccccatcacgctcacgatgcccgaaagagaacctcgtctagttcttcccaagatgcttggtgaaacgatcaccacatactgccctgatcctgatgaccttttattatcttctctttacaaaacacacgaatggattatcatggagaggctgagtgagggaccatgcccaattaccccagaggattttaaccaaggcatgggttctgtatctactactggaacatatctttgtcgatgtatagatgaccccggatttgatctcgccttcatctgtatctataaagaaatccctctggatggcactgagtttaataatttagagaatcggaagaagcaggctaccattgaatctttcgtggaactagatgccttgaagaagtttacagagaccgagtgtactgctatccctaaactccttggatatcaaatcaatagccaaggcgtgaacgacgttatcccccgcggatatattattcaccttatattcgaaaaggtccgaggagaacctcttgaatttgaggagttctggagctttcccttatataaacgcaaatctatccatgataaattcaaagttgcctatatatttgttatatagtctaattataatcacatctttcgagctaactagaattagggaaattctgaggtataggttcatgcttttatcaccggaatcattaaatatcatacttgataaagacacaggtgatatatatggtatcctataccctgaatactcttggatcttgaactaatattacatagcaaaatcaccggtttcgatatggctatagagatcgacccagagtacgaatggacagacatcaacttcgtgatatatgacctggtcctgctctcctcgaactatgagaagtacgttcccatggcgaatgatatcaccactgataagtacgagggctggaggtggtgagaaggagggttgatgctaaatgtcatgatctttttgacttgtttgcttgcttgcttcctgtttgctgttgcttctttccttggttcatagatgtttgctagctaagcgagatgattgatatctgccatgtttgtagcagtagtcagctatataagcaggcaatggccaaaggccacaatataaattccacgtagatgaacgactcatgactgtaactgcggtctcgcggtctcacacgaatcttcaaaataaatggttcagaattctaagctgtgtcgattgtgaggcgccagatcgacctttaagaaaaaaaagtaaattcaattaaataactaagatggagaaagaaagaagaagcaagttgtaaagtggaagcaaccagttgatatagctgaccactttgcaaacgttgcaaaccttgaaccttctcgcttagtgacctagcaaacaatctgtctaatgaagtaaacaatgcaaacatgaagcatttgatatcgatctattgtactctgtagaacgtgacatcaatccctcaaagtttcctttcctcaaatccgacccactctcatgacaccccatttagatgaggctttgataaattccaatatttcttcgattgcgagtcggtaggagcaagctatggtattaaaaaagataggcaaagatcagagctcttatcgtgcgaatgaattgggacaacccccacctttgaagcttgcgtactgcgtggatttcccgaagtggtttagtatcactctagtattctgaatacgcatcacatgacttacgaccctattcagagatcacctgatcccctaatctatctgtcaccatgaagatcgaaattaaatcgtgggttcgaatcaaatactctcagctagctagcatttaaacgccgttttcataattaatttttttttcctattggtggtagttaatttgaattaattcatggggaagatcatgtgatctctgaatagcttcatgttattgacataacaggtaatctctaaataccaggtacggtcctaagtcatgtgttggctatttagaatactactagttaggtatagcatgtcgaataccctaattaattggttatgaactttgggagggaaagcatagaatgtttgatattgacagtaaagaaggtatgactccagacatgatggagtaactaatgtattaatgtatttatttgagcccaagtgattgaataatatcttaatataaccatccatccaatttccaatctatgatggtatacgaaaaaatcccaaagcatcttctcggcctatccatcatagcgcatcgtgtccatgtgtctcaaacggcaatcccagacacaaaactccgacaacaatccacaatgccgcgctcgcatagattggtgcagtggtaaaaccggtctgcgacgagataatactggcgacgagtcctccaaatcgaaggagcgcagccgctgttccgcaagccgtgccacgatgaggagctgggaatgattctggagtgaacgcgtacataatagcgtattctgtgacactgattagctatgaaattagacatcggccatgatagcagtctcaccgaaattgcctagaaggctggtaacacaagaaaatgccaagtcggctgatggagtgttgactccgacatatgcgaagaggaacacgcctgtgacagcggctgaaattgacatcatccatcttcttcccatgcgggtattaaccgatactgcggcagataatggtccgactattccgacagctgatgtgatgcagtagttgcgatatgttagggagagagacgatttttctgtgaatttggtcgcaaggtaggaaggtaagaaggcgaagaacagcgggtatgcgattcctgaatagtgtgagtagagatataataaggaattgcgtctcacttaccgactgtcaaccagatggcccaaatgatcaatgtctgtctaccgagctttggagttgcgaacagtgcacggtagtgctcccctcggaacgcttgcatgttctccttcacaatttcttttgttgacattcgcttagactctccttcgctgggagtatttccaaacctggcatcgatttcttgaagcatctcaagcgtcaggggctctggctttccattttgtttcgcaacataattaatggcgttgaccgcatcctgatctcttccctgggagagcagatatctgggggtttcagggagtttgaaaacaaaaatgcgtatgatggtaaatgcgagggctagacctcctagagtgatgagtgtgtatctcctaatgattcgaaattagcgtggaaatgcactgtgtatcatggggctcttaccatcccatgttctggcttcgagaacatgtttctggggtggcatcagttggacaactaaagtgggctaggaatacccaagaaatcaaggagacaataagttgactcagattccaccaagccgaaagagctgtgagaagatactgatgactggaggtctttgagttagcagcggctcacagtaatatcgtcaaattgaaaactctcaccttcctgggacgaattctagaaatatcatcgaatcaacaggcacatttccaccggctgcagttccaatgactgcccaaagtgcactgaatgcaatgaagttcattgaaccagcagcggcacacagaaatatgccagcaatgagtagcgtacaattgaaggctggcttgcgtccaatgagatcgctcgatagaccccaaaacgaagcacccaaaatgaggccaacataatacgcaacggaactgtagctgacttggacgataccagtgaactcttgcttgataggtggctggacacttccaatgccctgtgatgcaaactattcgaagtatatgttagcaagagtgatttcaggaggaaagcagtgatcttgcatacattatcgactatccatccgaaaccggtgaccacgaagagtttccattggaacctagtagtgccaggatatcagtaccgcaatcaactgctcaagattgagaggagtgaataccagcccattccaatttcctccaggcattttcctactaactcagacttcaagcggtatgccttagtggtagaggatccgtagaaatcctcaacctcataatcatcaatagtcgttagcttagaaacctcatagtccggagtgctgctctctgttggccggatctgcttcttgtcgacttggatttcgtccatcttgcaattggaaattgagtgaggaatttcttgctctcaatgtagacatattcgggtcaaatgtcgttctcttttagggctacgatgttgctgccaatcgatcatcttgtctgatagtccatacacttcaggttgatacggatggatccggctaccaagagtggagagaaaataaggtgccatcccactcttgggcccgggacgcgttggatctacgatatcacaacagcttagaccaggccgacaattacttggcggcttcactgcacttcactctattaggtttatcgatcaattgagccaagcaatacatggttattcagtgctttttcgtgttgtgtgctgtagaatgtgctaatattgcaatttcttacttctattttggggttttggggttttcttcggtacgagagcatcaaatatgtagaaatatttataattgcaatatggataacactaggcaccgaccgcagcaacaaccggaataacatctgccttctgtaaatccaaatccttcttgaattcctcagcgcggccatagctctccttgtaagacgctgtaaccatatcctgcacagtaattggaccgtacttggcaggttccccctcttcgcgacagttaggcaaacactcgcagatatagtccgggtttccactgaaaaagaacggaatcgagtatctctctcgaccggatttgttgatcacacgatgggtgttggatttatatttgtcattcgccatgcgcatgaagaggttacccaaattcacgacatacgctccaggaacgggtttgacctatcaataaatctccgtcagagccaaggtcaagacactacgtcagtcataactcacatccagccattgacctgatggcgcatctagcacctgcaacccatcgacctcatcctgtagaaggagagtgatacatccaaagtcggtatgcgctccgatgccgcgattcaatttctcgtcggtgtcctccggctgcgcgggatagtgcaggtatcgcattgttgcaacggctccgtctgtgagagggtcgaagaatgttgattcaactcccagcgtttgagccaggacccccaaaacatcctttgccagatcgaacaccgcgtggtagtattccatggttgtttcttggaactcctccttattgggaacagtagggggccactggttggggccactgttcagtttcttctccagatagtaggggtggtcttcggggatttcctcgccgatgtacaggccttctttcagctctggcccggtgcctacttctagcatttgcgaccggaggagttcatagcctctgttgaaagtggtgagatctacttggttagcagaattcgcgatgagcgggtaaggatcttactcttgtcaattttcaatttctcctccaggggaagatcaaagaagcgcctggagcaattcatgacacggttctgcaagtccagtgggatgcggtggccagtgatctgaaagaagccattgtaatggcaacatttgcgcacttctgcgatcaactttgattttgcgtcgctatcctctccatagaatggagagaaatccaagatgggtggagctgcaggtagagacatagtagtggtgagttaaccgatgaggtgtgcttatgtttgcttttttagatcgcgctgctttcaatatatttctgtggaattgaataatagctacttcaagaccgttcaacctcgcacagaagtccgacatctcgactcgagctactccagctgtagctggagctctgggatgagccatgaaagatgggggtggtgacaagaatgtccaagaatgggggtcaacggttttagctcgcagcgataagggcgtgcggggaagacatgggaagaacaaaagtcaaaagtccaaaccatatcctatctggagaatctggagatatggctattggtcacgtctggttggatatggctttttgtactagtagtacatatgtgaacgtgaaagttaggaggttagaagagaggaaatattgcttagtataagaaccctgtccactaacccgtgggctagatatttgagaattagcccttttgaaaatatagttactatgatgtctgagttaaaatcaaccgcaacagccaaggtggctgaccccgaagtcaacgtaggggaaaccaccacttatacagatcgcgatgccgaaaggtcctatgtcaggaaaattgatttcattgtgctcccaacgctgtgcttggtaggttatctagcatgagaaacatacctagtagaattatcgctaacttcgaggcttttgtcatcgcacagatgtacttttttgactgcatggatcgggtaagtgccgagaagacggcatatgcgttcccgaaacatgctaaccatcattggcagagcaatttggcaaatgccaagacagatggtcttgagaaagacttgcacctgaagggaaatgactactctctattgattcttctcttctatatcccattcgggttgttcgatctgccgtggaaccttttgatcaaaaggttttctggaagaatcatgctgtctattagtgagactctccaaccctttgagatttgcttggacttgctgacatataaatgaaagtgtctattgtgtggggagttctagcactatgtcaatgcgccgctaaggactttggctcgctacttgcgattcgcataatcttaggtgtttttgaagccggtttcttcgccggagctaccttttacctcaccttgttctacaagcgtggggaaatgggattccgcctggctatcatgcagtcatttgcagttctagcgtccgctttcagtggattaatctcctttggggtattccaaataaaccacccggcagtcaaagggtggcagtggttgtttattatcgaaggatcgatgacattaattaccggagctgtggcgttttttgtgctcccagatggggcacagaaagcatggtttttgactgatagagagagggcggcagcgacagcacgtctgcttcgtgatacctcgtctgaggtgaatactccattcaatctcaaggcttgctttgagtcatggaacgactggaaattcccagtgtggtgtttgattacgttcacataccctgttgcgtatgccactgcaatgaatttcttccctttagtgagtatcaaggagcgtattgtcgaacgttggctaacgatagcagatcgttcaacgattgggatattccgtcgtcaagactaatttatggacggtggcgccaaatcttgtcggagcagtattcctgctatgtgtggccaagtcctccgactatttccgcgaaagaacgctccatattgtcttttctttgacaatttcattcgtcggaatgattatattaatcgcgattgacgttcagaacaacaagggagtagcatactttgcctgtttcctaatggcagcaggatcatatattccgtcctgtctcgttcatgcctggcacaacaataacaacgtccatgaaaactcacgagctgccaatacgggcttttttgtaggactggggaatttcgccggagtactgagcgcgggcacattccgaactcaatacgcaccaaagtgagatactctgctattatataaaggggcatcgctaactgactaggtatctgccaactctcatcgcaacttgttgttgcaacgcagtctgcatagtcctagttcttggattaggaggctggatgcgcatggagaatcatcgccgagatagcaaacagggactaagactgagagaggaccagactgatactagtcagtttaaggagggcgaaaagagtcctgagtggagatacttcccttgatatcttcgggttgtccatgatatcgccaagtagccctagctgagaaatccaaattttaccgtcatcttttagttggtgtagttcacttccctggctatgcatagaaagtacccctatatggtttattcttttgactcttaagcttttacaaatatattgctttctactactgcgtgtcatttttaatccccttttagttataacgtctttaacgacatcatagtgtcattatataactataacctctattgtatcatttcaagcaagataaatcgaggccgataggcggttgactactattatctgatcgaaatcaagtattcaaatcttacgatgcccctggggtatttggagaacttccccaacatccgcaatcccccggccctagtgggaaattgaagagcgctaagtggccaaaacctcaattggaaagaaatcgtctcgataagagctttgcatatctttttcaaattataccaatcgggaattagcgtcattttgtccccgcatgcttatcagtagacatcggcgtttaccccgagtaaattattgtcaaagacattgaagtgcacaaccagatctcgtttcgcacatgggcaactcaggcatgaaaaaccaggaaaagcatccgtgccaacacccaggctgtagcaaaagcttcacgcgcgcagagcacctgcgtcgccatgcgctcaaccacgagcaggcgcgcaatgggtatacctgcgagcgttgctctgttcactttcaacgctcagatttgctaggtaagagaataaactaggttcggtggctaggcaggtgctgatatgggtccagcgcgccatgtggaacgacaccagaaacgggatctcgaagctggagggcctgggcaggggacactcaagactcgaaagagaacccgcagagccgaggacggttcgattgttgttcgtccttcgcagcgacaactgaggactgcggctgcagctcgatccccgatctcggcaaatagtactagtcaggagccagaactgcgagatgaggtagagtattttaatgataatgttcccttgtcaccacctggctcgggcactgatccaacgtcgatctctatggatgacacagacccgtttctggcttcgttggtgccagctgggccttttgagcagtatgttgagccagtgcctggacagttcgatgcagcagatggttcttttggtgttgagttggatgggattggggattattttggaatggacaccggtatgggtgactccagctcgttggtcatgtttcgtgcgctaatctcagcagcaaccgacttcaacctcccatttgctgcgacgtctaattataattggctgttcgatgtttcctctctcgacgacgctttccatcaattcaacctccccctcggtttcgacacggcgcccattttggaacaattcgactcgaattccgccgaaggaccggagaaatacgatggcccatcggccttactcatggcgtcaatcatggacagaggcgaaacattcggagagaccgcctcacctgcagtacccagtctcccagacctggactggatgtctggtgcggcgacgctggaccctaaccctccaatgaatctaccgacaatatctgaagaagaccgaaaggggattctagcactcgttgcacaggcacatccaacaagcatggatggaaatcccatggtactcgactcgccactcctgacactccccgcgctccaggcatattgtgacatgttcttcgatcggttcaacacgacataccctctgattcaccagcatacgtttgacccaagcaccgcgccaccagtatttctcgcttcgattatcttcatgggcgcgacatatggtacgcgtgaagctcatcaattagcagtggaggtccacgatgttctacgaagccagctactctgtcatccggatttctcacctcaggctgacctgtgggtcctacaaaccatgcttctgatagattgtttcgggaagatgcgagctggtcccaaacagcgcgagcgggcacagttgttccactgtgtgctgatcaaaatgatcaggcgcagcaactgctgtgggatacgcgacctgtccaacgtcaatcagtcaggggatttggatcaaatgtggcgacaggctatggaagaagaacagcgtaagagagtggctatacactgcttcatgtgggatacacagcacgcagtgttattctcgcagtcgctctgtatgtctgcgttcgagatcagatcttcattaccgtgtggtcctgcagtctgggacgcctcctctgctcgggagtggtcgcagcacgcctttcgtgaagagaacaggcaattcctgactgttttgaaaggatatatcacaccggcggctgtcgcccgacctcgagatctgaatgttttcgctcgaattgtcgttctacatgggttgatgtctgtatctgcggacctgaaacgtcgcgatcagacaaccctacggtcggagacacccgagcgtgtcggggcttggacgccgcgcatgggtcggtcctatgacctgtggaaagtcgacttcgatgccgattgcctggcgattaaacttgctcagactgccagtcctcggcagttcacggggctcaagatctccgggtatgccctttaccatgcagcgtatctcgcgttgaatgtcgaggtcctcgatttgcaaattgtcgctggcgcgtgtcagatcctgggtcggacagttaccgaggccgatcaggcacggtcgctgcggaatattacaagatggctacaggaggaatccggaccatcctgtagtactgcacgccaagcggcatcattacttcaggatgcggtgttgagtcttcatgactgggaccaggctgattccttccacttcccctggtgtttatatctatgcacgttggcctgctgggtttttcatcgtggacctaatctcacatccgacgacaaccgaaccaatactgatctgtcttcgttgatcgtgatgctaactaattgtcctagcttaccggagctagcggttttatctggcaaatattgtcctcgccctctagcaggagctatggctaaacaactagcgactgtccggtgggctgttgttcacgatgctatgaaagttttgatgagattgtcatgatagtctttgtattctttgtatttgatagtcaatatgtagtttcccaatccgacatgttgatctgaacaagtgcggtttatctttatctatttactatagaaaggataatcggtataacccttctgagcaggatcagcaccatagaatgtcgtgcgatcataaggagtcaaaggcaaaccctccttcaaccgacgcggcagatcagggttggagatgaaataacgaccgaacacaatagcatccgctccacccgtggcaagcttgacacccgcattctcggcgttgaagtttccggccgcgaggagagagacccctgccttctttagtgtcggccggaacacatcaagtgacggcttgtccgaagccagggagtcgatcttagacgcttcatccatcacctcatcgaatcggggctcgaccatgtgcacgtatgcgggccgcgattcctcgggcagtccagcaatctgcgaaaagagcgcgagccagtggacgttggggtttgagtcccgtgtatcttggaaataattgtagggcgacagacggatgccaacacggtcagctccgatctcggcggtgacggcctcgaggacttcgattatgatgcgagatcgcttttcgatgctgccaccgtattcgtcggtgcgagtgttgacgttgtcgtggagaaattggtcaaggagatatccattggcacctgattcgttagtcacagcacatcatcaaggctggagttattcttaccgtgaacctccactccatcgaaaccagcctcgcgggctcgctttgctgcagcagcatactccttcactgtatcttggatttcctccaccgtcatagcccgcggtggtgaagctgcgtactcagatccatcgagtgcgtttccgctgattgggatctcactggctccaagaacttcccttccttcaatcaaggaggaaacagttgcgcggccaacatgccacagttgacagtatatatagccacccttagcatgcacagcatcggtaaccttcttccagccagcgatttgcgaggaagtaaagatgccagggactcctgggtatccggcggcctgaaaatgttagtttctcgaactagtcaaaccggtcaaactggccaaacagcccaaacagaagaaaattcacatacatatctgctaatcggagtcgcctcggtcaacataaatcctccatccgaagctcgctgcgaatagtactcgacattaagctcattcgggacataaacaccctcggactccttgctcgctctcatccgcgtcaacggtgccaaaactacacggtgcttgagagtcagagcacccaagcggacggactcgaacaaaggatcggtgactgcgattgaacccatttcgtaaggatatatttactttgcgattggcacattttggctttggctaaggtaatatttatagcttggaggggccatggtatgccatttttggcggttccattcttgacttttccattgaaggtgggatcattgatctgcttgaatagtgggatgatggtgaggcttgagggttcggctatcaaggaaaacaacccccactgtaaaacgagctcccccaccctcgaatgtgtctccactacccctttgggatggatatggtggtgatctgactgccaatgtatgctttaggtaccaacccctgaatactaactctcgtactccgtcgtctcaacaaatatcttgttgatctcactaatagtgactacgctcggttctatccgatcgaattgctaatttcttctcgtcaacttcatcccactatctagttagagcataatacctcggttgactgtgtggtgtacaaaaaagcgatgataatgtagaccacattatacgcaatttatatgtccacattggagagcatattaatcgaatagaagtgtacaaatagaaacactacgactaacctcgttataaccatactagaacaaagaaattcccaaaatagaggaaaagtcaggtcgaaaagacggcgtgaacgtgtcaataaccacaatttgtatattcatttctaaaacgcaagcccaaagagttactcctaccaaatattataccaagaaagagaaataatcctgcaaccactgccctatgacacccacttgttcggtgtcccaagtatcaatagccccaacatatccgtcaggcctcacaacagcgatcccaattttctcctggttcaaatccccaaaccacttctcagtacaactcggccctccaatattgtcgacatataatgtccaccgactagcctgcagtatttctggcagatcagcgatctcaaactcagactgggaagattgcgtgaccattgcgaaagtaaaagcattggagacagaagtgtagcgctgagcctgaacaaattcatctgacggggaatgccccctcggatgtttctcatacgactgatttgctcgcacgctgacaccagcaagaatatattgcaactgttcacatatattctccagcgattcccgggagcggtaaacattcggcacaaagatgtagatcttgaattgacccaagagcggaacatccaactcgatatcgactgggttagcatcaatatagcgagtgaccttagctggcagctgaagcattccaggctggaggcgagctgtggtggttggcgcttgtgtcaacattcccggagcatattcggctccaatgccggatataaaccgaatattgctgtcgaagttcttggccaattcttcatcgcctgctgcgaacgctttgcagtgttcaacatcgaagttgatgaggtcgtatgctatcttttgtctttcttcttcgtaggtgtggagtaaggaaggcttggccagtcctcggactaggaggttgagcttccatgcgaggttgaagctgtcgtgcatactcgtgttggcaccttgggctgcaagagcagagtgacagtggccggcctgtatattgattagactatgggtgatgtgaggtcaatccggtgcaacatacgtctcctgcaatgaatatatttgcctctgaatccatgaagcgtttcgcaacccgctggcccacaacatatgttccaaaccactctactgtcttccattctaggctgaacggatgcattgcctccctcgcgcgactcatgacatattcagtcgttgcctttgatttttccactcgctccccgtcggtggaactcaactccacatataatcgagtcatacccttctcgcgcggaatccataagatcgatccagcggaatgagaccgcaaggccactttactccatagatcagggaagtccgtatcgatcacacctatttggtgagccaaaaatcgtgccaagagattgaaaagacataccatccagcactccccacgccgcgtttgttaattcgccctcgagctcagcatccgggatgaatgatcgaaccttcgatcgagctccatcgcaaccaaccagataattcgctctgatcttgtgagccgtatttgtggtgacatcctcatagataatatccaattgtgtcgttccattcacaggcgaacaagacacgaatttgctattccgcgtaatagacacaccccgtgcctccatatcgtcaatcatgacctcctcaaccattccctgatgggctagcaagatataagggtcggaggcaccaacgtgctcggggtagtggactttgcgacctgtgcgtcgaagtgagtcgttggcagttgactcctgccaatttgttagccaaatccaggagcagaattgacctaagtcctacccagaaggatatgtcgtaaacccgagctccatttctcagcaatgggtctgccaaacgaagctgtctgaatgtttcgatggtcttaggttgcattccgtcggcctttcctgtggatgtcttgtcgggacgatcgtccagaatcaccacggcgattccaaagcgaacaagattacatcttcaaatgtgttagtataccgtccgtcgaagaaggaatttacatacgcaagcatcagccccgacggtcccgcgcccaccaccacaacggtagtagaagcatcgacagagccgattctgtagccttcgtggtctgcactaggtgacattatagaattcaattgttggttgacaatcacttaattcatttctatcttctctatttattgaaatcgatgctgcggggaaaacccccactcttcactgcagatgtttatcaccatcgtgtcaccccaccgtccacaacaatgtccgacccggtcatgtacgaactcgcgtcgcttgcgaggaatacacacgcccccatgatatcttctggttcggcaatccgaccgttcatgacttcggacttccagccctcgagcaaatgggggaactggccattagcggataacctggtgcactgccttggtgggaacttactgaagcggtcatttctgttttcacgaatcctggagagatggaattgactcggataccctgttatactaaattaatcaccgtccgtacaatagtttgcgcccaactcacatattcagccagctctttggcgatcgcgggacacatcgatctgactgcgccctttgtgccacaataagccgaacatagctggctgcggacagcgatatggctcgccatactggcgactaacacgatgctgccgtgctttgttttgttcgcgatcatttgcttggctgcgagctgggcagtgaagtaaagcccgaggacattgatagatagtagatcctgatgatccttgtaggtaaactcgaggaatggaagatgtcgattaataccagcacaaggaacgcaaatatcgagagcgttttcaaaatccttctggaagctagcgaacccttcttgcaaagactcctgggatgagacatcgactctgttgttgttagcgatgaaacctgaaatgaacagtcaacccacttgtaatacgcagttcggacaccgcaatccttttcgattgcatggaatccttcctctggcgaaataacatcaaacacagctacatcagcgccggcctcggcgagcccccgcgcaaatgctagcccgcaaccccgagcacctcctgtaaccagtgctgtgcgccctttcaaagaaaactggctcggttagctcgggccaagaaaaagttggaaacactcactctcgacatatcgcagtgtagctgaatattgtcttgctgtgtagtgaagcctttcccctcagacatgcctcccttttaagctatcggatagcggcatacccacgctaagctaacccccatctttgtacatggttggagtagagtgaaataaagatggagtaaccatatcccatgtgcctatctatcataagtagtcctgtctgacagacgaccggtattcaacaattcaaacatctttcatccgggttctgttacacaccaatcacaatggcccctcaaatccccatcaaagaacaagccacccgctgcgtgtcatgtcgactcaaggttgtcattgtcggcgcaggtctcgcaggcctcgggtctgcgattagttgcgcccttgctgggcatgaggtccaggtcctagaagcaacacgggaaatcaaggaggtcggcgcaggtatccagatcctacccaatagctcgcgtgtactgcaacattggggtcttgaagaggcacttacaccacacatgacctttccccgggtctgtaatttccttggatggaagggcaatcccatttcttccatggactttcacacatcggagagtaattatcccggcacctggtatcgtgactttcatcgtgcggacctgcaaaaatgtctggttgagagagcgctcgaactgggggttagtatcacctgcaattctcgtgtggtggatgtcactgtgagcgaggatggggccatcgctactgcttctgcgtcggatggaagacagtggactggagatctcgtcattggggcagatggagtgtttggaaaattgacggaaggtttgctcggcagagtcgatccgccggtcaaaactggtgatcttgcataccgtttgctgttgtctacgaaggagatgcttaaggatcctgatctggcggaattggtaacagatccccaagtcaattattggttaggtccggatgctcatgcaggtatgtgtttctcttcctggtctgggttttgtcgttaattgtgtagtgaactatgttcttcgtagtggagaattgttcaatatggtcctacttgtccccgacgatattccagaagaatctctggcatcgacgattgaagggaatgtggaagagatgtgtgctttgttcaaagactgggatcctcggtacattctacgatgaccttcacttatggacacatggctgactataccagtatccccaaactactaaagctctgcgattccgtccagaaatggcgtctttgcatccgatttggagactttgactggactcatccctccggggcgtttgttatattaggcgacgcagttcacgctacattgccatacctggcatctgggtatgatagccttatatttacttaattccacattcactaactaccacagtgccggaatgtcattcgaggatggagcagttctaggtgaatgcctctctcgactcccgaatagccccggaatctccaaaacctcggtcgagttcctgacggccaaacaacacgccctttccatcttccaggagtgtcgcaagcaacgaacgaaaatgattgtggaacggggaaatattcaacaatatctctatcacctacatgacggcactgaacaggaagaaagagatcgcaagatgaggatggtcccaactcccgagggagaagcattggcttggcgagaccccggtttagcacccaaattgttgggatacgaccacattgcagacgtaagtaatcgtttcaccgtttcggcggctctgaagttcactgaccgtgcttaggttgatcgtcgatggggtaaatcactaggaactagtgttattgactcgagactatagtttgatatcaccattcctgtcttggtctttcttgtcattctctgctataatctgctatatttgacctacaatcatattattttagacacatatgtctttagaagtttcttcctaggttgctcgctccaattacttgacctatcttggcctatggcttgttggaagctgcctttgatccccaacacttaggaatcaagctcccaccatagtaagggagctttttgacaggggccggcgtgttcttgagactcagatgatgaaagcagcaatataaagtatgctagttactcgcagcagatattccaagttcttttgggttgtcttttcgcgtgaggtttgagtgagatctttctagatatgtgccttcttccatatcctttgttataccgtttgtcatactgtttgtcatgtcctttttcctggtcaccatttgcagctgtgtcaaactcattctgctatcctactcccctttacacccttccaaagtcggtcaccttccttcttgtcttcttcttatcttcttagcgcaacaagtaggatctattcatatctggatatctcactttgatttggacggagattttccaagcaccagggcaatattcttaaaaggtatatatcttttagcatcgggtctcagctatccattcccaatacctctttcgtgtgccttactgaccgtacttgtgcaaggacttagaacgatgtcctccgatgaagcccagaaacgggcaaaggctaccaagccgcaaaaatcaaagatttctgtatcccagcagatgataatgataggaatgagcttgtttcgcgtaagcctggattgaggaacatgaccatacacaccatcccaaaagactggtgtttatccgcctcggaagcaacagactcgcaatatgccatgcttcggtcatattctcccagagcatcctctatcaacacttttctggacgaatgtgatagccttggacttacgaatgatctcctgaacgaagctgataggatccttgatgcctctaccgaatggtcagggtcctttgcaactgccaggcgtctgcaacagcagacaatgactgttggcggggtgcgagacagagacataattcagaacacagcggtaagacctcgcagtgccatgccccattcaactcacaatcttccagaggttgaggatgaggcaatctcaaacgcggccgccataatccttctgcagacattgtcacacctcgtcaaaaccaacctagaatggattttcaatcgagttcacttttcatgcaagtttacaagcatgacgtacaatgtttacaccgacggagctttgcggtcaaagaccacgtcgaaaatatttggaatcttggaggtgaaaaaaagaatgcgcacggtgaatccagccgccatcttcgcccaaggggcctgccaggtcgcggggtggttaatggaatcatccgcagagatggctgttttcaacaaccagtaagtttgatcgcggcttaatgcttaaaccgctatgaatggctctataggattcgactaactgatcacaccccctttctagttacatgctggtttcgcaagacagacatcaattttttttgacctttgcacccttcaacgaaaactacgaaagttacttgcacaacggaactgacaccgacgtgtttctcgtcatgcacacggttggtcccttttcgacatccgacgctcgacaaatggcacaattcgggcgcatttttgtcgccgctacactggttgccaagtcggctgctgccaacattcattgaaccgttctccacgtccactgctttctcctggttgatgtaatagaccttgttcgctacctttaccaaataaaattgttctttgtgtctactgaatgaaacccaataattatatatgtcctctattgtagatagcgccgagaatatgaagcaaatgaaatcagctcctaggaaagattcattgataagttaactagaatactgagtccataagaaaggcgtctttggttcaaggtagacagttaatccttgtccgttggaagagaaaagactgaacattagaacttgattatttgcccactccctctgaatcatgtggctctgcatctagcctgggccttctaaacttccttgcccggacggatccaaacatcctcgcaagcgtatgctctttttgtgagctctgattcatgttcagcatcttttgccccatctagtacatcaagagtgcaaaccttagggatgtcgatgacaactgtgggtttgggaactgtgggcattctgggatttccgactaggtcggcggacatgaatccgagcagaatgttcatactctcgtttgcgacttcgttagtcgagaaatcaaaaagctgagtcttcttgatgactagaccatcttggctggattgggcttcgattacacgagctttcattccgccaaagactgtgatagccataatctatattaaaatcgatatatgttagtcctcaagacatataagtacttcttgagcctatacttaccggaattgtattgtactgcaagaagtcctcgttttgaagtcgtgtgatcatagcagtggtaatagtcattacctctgcccgaaacagcccttcgctaggctgctctccaatcacaatcgtgatcatgacatatgggggacgtggctgaccaccactcggtgtcttcgccacaaacatggtgttcggcgaccatcggaccgatgtccaaatagctgggtagaactcgtcggcgatgattgacgggacattattgccactatcaagcgtacgttggtctacctattgcatcgtaatggaaccatatcacttacctctccagtcatctagactcttgcctaaggttaggtggaactctgtcatctcctggggggtagaactgtcggcgaaactgaaagaacatccattctagagccgaatggatatacgatgcctgggaattagcaccttcttttgagaggcgatctgtgaattcctcccatcgctcagtaagtgaggtcagtcgtctctggcagtcggggttagtaagaacaatggggggaacccatgcagcacctttgggttcaaagaaaaccggcccgtggggatcagaatatggagcataggtgtgtcttccattctcgtctatctcaagagatcgaacatcgatgtgaagagactggtaggattcggggtcgatctcgatagaggtgagactttcggccccattgtagacatcgttgatagcgttcagaacttcgctgtgagcttccaaggagtctttgatctgttggcccgcatgacgatgtaacgtgggaatctttttgggcatgctgactaggctgaagagctagaaggaaagcagaagttggaagttggagaatccaggaatggtgggtcaacaatgaccaggtgaggtgtaatggggaatgatatatgtccccgtttggcttgttccgctgatggctgaggcccccgtttccccaccacaaaggagcctcacacctcctttctgtttattagtgtctgtctctttattggagagatatctttcttctatggtcatttcaattctcctgtatcctttgccaatagcgcccggccattcttcaacctgccgaaaaggagtatggcgtgaagatctacgtcatttccaagtgcatgattcaaatccccctgatttaagctgttagctgagtatccaagacactttccaagaattaatatttgattcctgttagaatcaagacgtgagacccaacattcttaaggtgagatgtagcatagacctacgtgtaagggatattattttccccctcggtcgatcgtggggtaagccgttaggactagcgttatcgtcagggctgtagacccccatctttgatattttggagtcactaagctccacgtacctctatctagggcaaaaggtccaatttattgaaaataaaataaaataatcttatcgttcatgtttccccccattttaaatcccctcacgatacatcgatacatgtccaagagcacctatatagactttatgctcgtaatcccaatttgattcaaacgtatcatccattcaaaatgtggcggattttcagcgcaggaaccacggcaaaagaagaccctccacatggtctaccagcgtcatggtatcgctcagaagcaatgtaccaattggaaagacgggcaatcttctcgaagcgatggatgctgctcacccactccagccgtttcaagaaaccgggcgattatctctctttcacaatcgccaacttctccttcttccttatccaggaccgcgacggcacaatcaacagcttccacaacgtctgccgtcaccgcgcattccccgttgtacagtcttcctccggcactacatccatcctcagctgcaagtaccacggatggtcatacggcctgaagggcaatctcgccaaggctccgcggttcgagacagtacccgatttcgacaaaacccagcactcgctattcccaatccatgtgcacgtcgacaaagctggctttgtgtgggtcaatctgcaggccggtgagacggatgtgaaatgggaagacgattatgagaaagttgacgaggagccccggatgcaggactttgactttgccgcagaattcaagttcgaccattactgggagatggaattggacgcgaactggaagggtgtgattgagaattataatgagtgctaccattgcgctacttcgcatccgcttatcaacggcgtgtcggatctaccaaaatatcgggttgagcccaaggcccggtatatggaacatcatatcttcaataaggagggttcggatagccagtttcgacgggcgatcacgtatttctatccgacgacttctgttacggtgacgtgagtataggaaatccaaatgtgaaagtcaacaccagggctaactaagaacgaactagtgataaattcttctatatccagcgtatgatccctgtttctgctacctcgagcaagatcgaaaatgaggtttaccgtcaccgggatgccacagatgaagaatttgagaatatcaacgcgttttacaggcaggttctcgacgaggacaaggagctttgtgttggaacgcaggagaacctcaatgcaggggtctttaccaatggcgaactacaccctagcaaagagaaggtaaatcgaactgtgacagtgctaatacagcggctaaccgcgacattagggccccatacactttcaaagcagcgtcagacaaatggtcatagaacaccggaaaaatgaggaaaagcaaggaggatccgagatttggccggccaccccgaaccctcagttctcgaagggttcagcagaagatgagagcttttgttcgcagttggatgcttctagttgtatggccaaaccagaactggcctggtagccagatacacatgtacctgggcgaaatgcaaggctgaacgtggaactgcttacagtcaattaccaattaggaactatttcatacttcgcactttagactagtcggggagatccccagataccgaatcaaagaaaaaatacaagcaggactgtatcatgaattcgctaaataatacccacaggcgaagataacttagttattcaatccaagagggttatcccctgtctgcttctggcccccaacactagaaacaccgttctgtacgccctgtccagcgcccttcgccgtattgccgacaccctctgttgcgcctgacacggtctgtccaaggcctgatgttgcgttgcccacggttgagccgagaccgccgactgtgccgcctactgtatttgtcacgccgccgactgtcttgcccaaggtatcgcctaggccgccgaggagtccagctatggatatttgtcagttggggtgggattttgatggttggttattgggaacgtacggttctgttcgttggacatggtgattatgtggaagaggctgtgtggtttgagtgacttgtgtggtatggagtgtgtaactgaaatagttgaatgtgtgtcaagtgttttgatcttgatgtagtgagatggtaggcatcgctgtctttatttatatcaccgccctgaaactggttacatagccatgacagccatcttgaggctaatatcttgaatgtatccatctgacgtactgacgtaccccatatcccccgcagtgtagataataggatgttattattggttgatattcgccgatcacatgggtacttattgtccgattaattgtttcaagaaagtctgttatattaaaagaatgtggcgaatggtggatgactggttggttattgttggtcttgtttgcaagggtatgatgtcatttttcgttcggacctggccaggagattttatattaactgtagctggatgatctcattcccgacggaattcttgtctgcagaggtaaattggtgcgtatcatgaaggctattacgacgtacatagaaggacaagattgtaaataacccatcgtgtccaacaaaggaatacatcgtcatacctatttacagactcgcctttccgcgagactcatatggcatgaacaacacaagaattcccgctgcgaggaacagcgccccgctaacataaacaggagcagcggttgtgagatcagcaaacattgcaataataggagccatgatgccaaagatccggttcgcagacgcggtcaatgcgttgcccgtaccacggtccttggtgagaaagatctcgggggtatatgcatataaaacggcatacatgagactactcatgaaattaaaggcgcagttccagcctagcagagcatttgatgtggtagctgttgttgacgcaagaagaaaggctccagttatagccgttgaactagagagagcacccttgcggccaaagcgtggcagttcaaccagcactccaccgagcagacagcctgggatgcccataacggcaataatcaatgaattccgatacgtgatatatgtcgatccgtcaccaaattcagcgcctctggactgctggatgtatggaaggaatgcattgtatagtggaaagccgagaccgatgaatgcccaaacgaggatgatcgaggttgtagcccatgctcgttttggggtatcgaaaagagcgcggagatgatcaaaccgcacggtttctaggcgttggcggacgatgtttgccgcgctgaaattctgtatctcgccctggtcccaggcgtccagatcggttctcgatagatcagagacttttccatttcttcgagcaacttcgtggacaacctccacagcctgttcgttcctccccttccccatgaggtattttggcgactcaaaaaccgtgaaaaacacaaaccgaccgacgaacatgatcattgcgatgccacccattgcgataataaaccatcgccatcccatgttttcggctttcgtacatccttctgcagaaccacaagtcctatacccaagcagcggccaaccaatcaaagtggcgacgacctgggccaaagcccagtcaatcgataagatagtcaacaggtactgatgagatccaggtaagaactcgagaaagatggccgagtccacgggcagattcccaccgacgccaacagaccacaaagccgcaaaagtacaaacggccgcgaaattaggcgatcccgccgcaaccaggccaaacaccgccgtgattccgatcgtcaagttgaacgcccatctgcgaccgaagacgtcgcatccaaatccccaaaacacagcaccgaccagcaacccgatgttttgcgcaagtgtcaaaagcggtgctttcgaggggtgaaattcgtttgagactgcggggaggatcagggacgtaacaatcggccacaagttatcgctcgcccagccgaatccgatcaccacaaagagctgccattggtatcggcccatgccgatcgtctgaatcgcttggtttagaacctcagctttggctttgtagttcgcgtcgggaccttcattttgagggacagctgggccctcgatcgccgttggctcaaggccaggcaatttggtcacttccggcatgttctgttgacaaagggaaggaggtaggaacgcagatggaaggggggcacacggcttatactataactgtccgcattctcgctctggcccccgctcgggtcgaaaattccatgcgtctaatcatatcccatgcagtagcttccacatcaactttattcaggggtctccttctttttccatcgacttggattggatggttttatggcgtgatggatggctagttttgtgtcagagtcagcgagaggaggttgtggcaatgccgtatgagctccgtggaggtttgacgagtcttcgggctttggcctcttcgcgtctcttttccgcctgaaggaacagtgcgtagtaacctaaggaggtcttatcggccatggatcttccaggggaataacgcctcgagataatacgaacccgatcgttgcttcatccggaaactattgtcaaccgatcacggctcccggcaggaggtaataaataatatagaaaagatgcctgctattccctaaatcgttgatccgctggtatttttttccgctccgagacaaagttgtgtcaccatgcatatataactattccacaacctgatacaacctgtagaactcgtaagtcccgaacacaaatggatcgcctgtcgcgtgtatgagtcttcaattagtcggattccataatgcttctgcaagataggtgacattcttatgatgcgtgcagtttgcgtgaagctgactgcacaaacgcgagctgacaggatcagcagcgctaatcttacatccggaaggctgactgcatttgccaggggtgccggaatacccaattagggttagccttgaaacaataccaattccagtccagatcgaattatacctcatatattccataaaccacctcgagtacttgagattgatttctcaacgtctccacgtggttcgtgaattgctgttggcaaaagagtatgctttatgacgttagatacgaagtctaaaatattgaaatacccctatggaacacttaccatgctgtggaaattctaatcagtccctattaccgttttagcctactatagaacatagccaaggcaaagcacttgagttgtcctgcatctaatataaccgtttaagcatgtctagcctgtaacatagtattgtccactgatattcaggcccgatggaagttgtacaatatggggccaaatcaatatctgagtaaattgtgtaaagagtgactagtaacatgatgattcgaagtttaaacttagatttgattgaattccaaaacgtagccagcaaattggttgaatccctccaaactgtccacatagttcagtcggaaaattcatcgaacccaatctagtcccattgtcagcacactcgctgttctcatcctagcatttagctccgccctcggtgccaccgtggcacgagtttgtgtggcagtcttgaacctctgtccactttccacctttgcactcgaccttttcacaaaaatatacattagcaaacatgaaacactattggaacctggacatgttgacatacaataccggtcctgtcacagccacagaagtgtctgtctccgtttgatgcctggcaagggctgtttgtacgtctttgggcgggatcatagccgcttccgcaggtgtcccgcttgtccaggaccgaagcattgacggcggtagcagccataagagtgaagaggatagcggtaaccttcattgtaaaagaagtgttttatatcaaaaaaagtggttgtgtgtctgaggaggttgattagaggcttgatgtccaagagtatgagtttctggaggatattgagacgtatatatacatttccagaacaaatgccaagtcgtatggatttcataccatggacagtttattcagattcttggagttggacgcctcgtgtgccaagtgccaaaagtatacctcgaagccagcaattggtcctggggttgaggttgaggttgcattgcaggaaattgaccagacgactctttcaggcccccgagctgaaaatgaaacgcctcaaagagatgtgtattatttactagaatagtagactatctatgtagatcaatcttggctgtttggggatacgatgagcatttgtgagaatcatccctacttgagcctatgcatataagcataacataccatcgggcccagaaacagcagtgccaaactggattgtccatagtaaaccgggatggactaagcaaccaatagcaaatagtggcccattgaagacatatagaatgtggtatagcttgaaaaacgatgatcaaattccgaaattccgaaattgaatttacaaccgcaaacccaattatacatcaaattaggtatatcatgtatagagcggccaggttctcgaataaaatacccaagaactaggagctagcgctctagccctggggatatgcaagaagacagacgaatctaatagatagtatcacatatattaattggttatacaaccagtatcacataactcgttaacctcacaaattggacttgtcgcatgactagaggctatcagatcacctctttcggctataaggggttcgtaaaccaaacctagggttacatcttcctacatgcatttttggctctttggcatttttggctttttcgcgggagggcggaccacgggagatccacacgccgccttttgaagagaccctttgcatgtccaaatggtaattgtgtatctttctttctggttcataggtaacagatacttacaatgaacagtgaattcctcgggattgcggtctgatagcaattatttcaaggggataggtatagcgactccctcttcagtactcaatttaacatgttctttgtcatggtgtgaatggtttgcctacatctgcaggtgcatggcccgagtgccagttgtgccttcatgcctgacttttgcctacttcctgaccacttgaatgtactgtaaatcatcgtaatatgaaggtcttttgtaatataccaatatcaggcagtaagacatcactatttaccggaaatggaggttagcccctggcatctagaccgctgcttactacagcccaggaggccgtagccccaggtcacgctcttgcaaccttggaatgttcaggtgagcattggagttcagcccaagtatgagacctaataaggcaaagtgactcgaactgtcttgtccatgtccgaggcaagccacccacatgatctggcaacgaggctgactacacccctctacgatgatctcacaagatttactacgtcagttcaaagttcaaggtgtttattgtcccggctatatacgcgaacaaaacctagtctccacagctaaagcaagccggttgtgcatttcggcagcagtgagtcctcgtatcacagaagaaacccgctactcaagccaaccgccatgtgtaaaatcacttgttcggactccggtcctcctccccatcatatccaagatgacatcttagatcatgagacgctcgacttggttcttgatggcgcggatctgggcggtcaggtcactggcctcgttggtagtgatggaggcagcaatcacgggacgggagacaccagtggcacggccaagagccatcttactgggaacgtaaacgtagggaacctaatttgaatgattagttttgtttatctggtgtagcgccctagggtatgggctctaggatattggactcacgttcttgtcctcggccaaaagaggcaagtgaagcacaatggcgagagggctggtatcggcggccatgatgacaagttccgaggttccgcggttaagggacttggtgcactcgtttgcgcccttcttcaattgacgatagtgcgccgcctgctgcacaagatcaagaaggctctgggcgagggcctcatcggcgatgggccacgctgcgctagtatcttcggccattgttgcgttgtagttgggaatttaaacaccagatcttgaagaaatggctcactcgggggatcacggccgtgtagttgaaacggaagataagtggaatgtagattgaggttaagttggagatgatcgtgggaaattttttgagagcggatcgtttggacacaccgcctactgaatttgcaagtatttctgcaactggttggcgctcaccgcccttgtttaattggccaccccagatatcccgccacccaggatgtctgcgccgaaatctttttcgaacccctacaatgtccacaggaataccacaattactcagtgatctgttagtagttacgccaaatctttctacatttcctcacttagatgtcctacaggcaataaatgactgcacaatcttaggcggtcctctcgcactgatcacatcaacaaactactcgagaaatcacaggtcttttcgtatcgttgtcaatatttcttgaaggcctcaaacccttaattcgtatgcaaatctatgaatctagtatcttgatatgctaattgtacagaaaatacccagccgcttaattggtgccgttcacagtggcagaggcaagtctagagcgcgcacgcagtgcagggccaaacttatacagaatgaacggaataaacgtcaagaccgtcgccaccaatgccaatatcaacccagcgtactgactacccacgttgtggaagaactgggaagcaaacaaaggcgacacagcaccgagtgtgttgcgcatgaaaccctgaccagcaatggcagaagaagagtgttctccgtaacaatcggccgtataactgtagcaggactcgaaaatgaagaagataccgatggtgatgagagccaatccgacgattggacccatccagtggagacccttgtactgggtgaagctgtagacaaataatccgatcggcagccagacggctccccataggacaccatacagccgatcttcgggtgagacctcaacgttcggattggaggcaatggagttgtatttgcgaatttgcaagaagtggaacccgaagccgatggtggttccgaggcagagagaaatatagggaagacctccgactccttcgccccagccgcgcttctcttcgaaggtaattggaatgacggacaggaagaggaaggccaggaaccaggcgaaactgatccaaagaccgaaggcaaagacgacgggctcggtgaagagcatcttcacggccttaacagaggagttgtgtaacatgtgtttgagcccaggggcttcgatatcattgaaggtcacgaaattgtcattgccggtggcctggcggattgccttcgcacgtttgcttaggcatacactaccacgggtttcgggcaggcaaaaaatgatgataataccaagggggatgttcgccaaaccctggataccctcgagccagcgccagccgagagcctggtcgataaatccggcgtagatgggcgcaccgactgtaccgagaatggcaataaaggagaaacaagccatcgggatagcacggtggtccggtatatacatatcaccgaaagtgccaccaacaagaattgtaccaacacaaccaaacaaacccagcagagcacgacatactaggattgtggcgatgttcttaccgagagcgagaccgatgaacataagacaaaagcaaacgtaggcaccgacatagacaactcgtcgaccggccagctcgcagaagggagcgaggaaaagaggagcaagtgcacatgtaaagttgaaggtgaaaagaccaagctttccaatttcttctgttgtccctagatccgctgccatgcgtgaaattccggaactgtatgctgttgtggcgagaccgatgaaaagtgtcatcaggcaaagctgactgctgatgaaggcctttcggcctatactccagttgaaggggttctgtttgtctccatccacgaagtccagcacgatgtattctcggccatcgtgctgcacaggccttgttgctgtaaggggaagatccacgtccacctcttgcaataagctgctgtcgtaatgctgggtttgctcttctgaaagttcattccggtactttccaccgacgattagaccctttgccgtgtgtgtctcgtcggctgacatagtgtcaactgagggaatattctcgtcatgggaagctgatataggctgaggatttttggaggccttcatattgacatagattgtggagagtgaaggttggaaaagctgtctaggggagaatcaacagcatggggtttggtccctttctataatttttaagtgttcctggctgaaagtcgcgtgatgtgagtggtgctccagactccagaatttgatgagaaccggggctgcgggattatacggagagtggggaagggaattccaggtaatgatcaattattatgctgccaacacggagaacaatgaagaacctgctgatcaatgaatgggttggaataccaagtaagtgggtatgacgaagactacgtaaaaatgctagtagcggggcgcttttcgtcgtcgtatgttggatacatacagtcagtccggtcactggggaaagtctcataacaagtctcataacaatgctgtctccaattctcgctcgtgatatgctattctccttcgcccactctcgtgcgtcagcatcagggcatgcttatgatgcgtatagatatctccggaacgaaaggattcatgtctcggatgattgccggtgtttgagttttccctatatcgccgacgatggtccgaataacctcccgagccgagttagctccacaattcaaagttattgtcggcatgccggttttgactcggattagatgcccgagtgacggaaaaaggtgtgataaagttcagcaaagaccagttgttgtgttataataactcattgaagatacatctatcctaactgaacttataagtgaagttataacaattcacacatgaactattgagccgcgcagtgacccactcgccacctgttccttcccagtgaactttccggtgagtcctattgcagtaggatttccgagatttgccccgtacctatgcatctaaacgatcatttccaataatatcatgtgcctggatcggtgtttcttcgccttccccaccagactcatgtttccccgcctaactctccggcttagctgtctaccggctgatccggtcatattgtcagggatcgttccccttcccacgtcatggtacgtagtacatggctcctcgaaggctagtaacctttatgcaatctttatgcagtatctcccattgtaacccctcaacttgccctgtcctggcaagaaccatacgcccaaacgctgtacacctattatatcgctgagggaatttcgacacctatctcatctcaacccttctaccagctcaccattgcttggcgtcgcaataccaaactttttccacctacatagtactcatatttaaacatcacttctgtgttccaaccaatctgaaaatcccacgcaatcaagcacgtagtttaaaatgtcttatataggatataggatagcatccattttagcctcaagcttattggccgcagaacgctcgctgagatctgacacgtgttgtaataccggaagagcacaaaccacattggatatctctgttaagatcgcacggcgagtctgtttaaagcacatactttattgtagaatgcgttggtagcaagcttctcgagagtgcttcggtgtaggtatagatagtgttgagagggagtgatgccgacggcgctcagtcggatggaggaataagccttgggcgacctgctgtcttggaggaagagaatagtcgattgaggagttagccgatgtttgagtttatggaacgcggaggttgtcttcgccttcatagccagtggaaccagcttccatcgcaaagcttaccgaattatatcctccatgaatgctcgattatctcacctgaccggttcaagtaaggtctcatctccaatatagcagtatgcatcgcgaagggaggctcggtgacaacggacggtgacggaaggaaatgaatgtgacttatgaggtgaactctgaacttttccgtgtcgctgccgcccagttgttagaattccggacgaagttagcatactcgacgttgtagaataacctgagggggtatcagggaagtcattaaaagaatttggaagtccggggtaaggtgtccaagctggtcatagttccacggtcagtaggggtacaatgtgtacatatagcaatacccacagtcaactccacggttctgcaacgcttttagattctttggggaaaatgtttataatttcgtacttttagccagattcaaaacattcaacacagttaaatcatttatccaatctaagataatgctatattagttgcccaagtcaagtatattccaccaatcagcatgttagctcaggggaagagcgccgggctcataacccggaggtacgtttcaccgaacccaatttgactcacgaacgtcannnnnnnnnnnnnnnnnnnnnnnnnnnnnnnnnnnnnnnnnnnnnnnnnnnnnnnnnnnnnnnnnnnnnnnnnnnnnnnnnnnnnnnnnnnnnnnnnnnnnnnnnnnnnnnnnnnnnnnnnnnnnnnnnnnnnnnnnnnnnnnnnnnnnnnnnnnnnnnnnnnnnnnnnnnnnnnnnnnnnnnnnnnnnnnnnnnnnnnnnnnnnnnnnatgctatgtctatttttttttttttttgccctctcttattgtcctcattcctttcttttaaaggtccttttttgctaatacatcaagcatgtcatatgtgggggaattatttgaaagtccaatcgtcgtgatcacccatgcagcattccaagttaagaagtcttcatgacatcagtaaccccaactaggtatcattttgatcaccacgcaatagccctggggctacgattccctaggtctgtatgagatcgttaagaatatcatgacatacttgactccccgatatagcctcacatgcaaggctctttcattcatctaaaagatgcctggactttgtcctgcctgagagcatcatactgatgtaatctatgggttcaatttacactagtataaatatctgattgaccatgacccagacggaagtcaatgtaaggcttttcagttctctactattttggaaaagatgacggaccctaattcagaacaccaccttcacaggtaaggcatcaatcccatcccaaccggtatcatgatgctcacattcacaaggtacggcaactggatgccagcagactacaaagctcaccaagaatggctggggggaataatcaagaaagtcgacgacgagtctcagaaacccctccacccggtcctagaggaattcagacaactcatcgaatcgaacactcgcatatacatgctcttgacttcaatgttcaaggaagtcccacggaagaagcgatacggccacgacgtaacgggaaaccctgaaatccgcgactataaccatttcctgcgtgttctcaaccatctcctcaccactgcgccttcctggaccgacaaggcaaaccgcgtcgggctagtcggtttgcctattaatgccgtcctcgactggccgatgggtacacctagtggatatgcggccttcctagatcccgagatcaacgcgatgatcaagaagatcttgaatgtgtggggcgaattcctgcgctctcccgcttccgccgatgtgctgaataacacctctcacggatggttcggtaagactggccgtcgggatcttacagctgttgcaaagatcggtccgctagcgcagacggaactggaattccatgacatgtttgaatgtgacccatatgctccaaatcacggcttcaagtcatgggatgacttcttcacccgcaccctcagggagggaatacgccccgtcgcagatccggaggacggaaaggttatcgctaacgcgtgcgagtcgaggccgtataggattgcgcaccatgttaaagtgcgtgaccacttctggatcaagagccagccctactctgtgctcgatatgctgggccatgatgaacttgcgtcgcagtttgttggcggcactatttatcaggcattccttagtgcgttaagttatcaccgttggcacgcgcctgttagtgggaaggttgtcaaggcctatgttgttaacggcacttactattccgaaccgttgttcgaaggtgttgggaacccggatgttgagcagaaggatattgacatggcaggtcaggtcacttcgcagggatacatcacttcaaccgccacgcgagcactcattttcatcgaagcggatgagccagccattgggttggtggcattcattggagttggaatggcagaggtctccacctgtgatatcaccgtcaaggagggcgataaattgaagaagggagatgaaattggcatgttccattttggtggttcgacacattgtcttcttttccgaaagggtgtccatgtctctggcttcccagagcccggactggcagagaacaagcctgttcgaagcaaactagcagtcgtctcgtgaggaacagaatttaatgctcgaattgcccatatttcgggtagaaaagttggacttcaataaagatcagtatattttcctgcatttatggtaaatatatctccagtatttaaaaccatcggcagcctcataaagaacgagccaacgagttttctgcacaatagactgcgtaattcatcgtttactgaatataacatcaagtaaagctgcttcacttccagattttcgattcgatttactacaagcgttttggctctgggagcagtggaaacaggaaaagcacgtgatctatcatattgtcagcggttgctccagcgacaatctcggggatactattcccaacaacattagctacttatcgcgagtctttcagggaaaaatagggtcaactttgcagcagacaatgttgcgtttaactcgccccgatgtctgccgggaaaacccccgcgatcttgtcttgggtcgaagaagttgcgaggagcgtgcccgaaaccccgcctaataccgaaagactggtggaaaacgcttcaactccagcatctcagcacaaacgcaagaggtcggtgttcgaagccgagaatccgatgtcgcagtcagaccctcataagagatcctaccgaactacctctgaaacagcatccaccgtttccgtccgcttagctgacgagataatctctctggccccatcaagttccgcggccagtcggggtggtgggcgatcacgctcatcgagtccatcacgcgtgaaggctgaactagccacagccatccctcgggtggtctatatacatgaatccgccgaccctaaaagccgtgctgcgagtcagctactagcagatttaacacaagattctgagttcagtggaaatgaagatgttgctcagaaaatctcgagtgcttcgtgtcaatgtgccacagaattgcgtagcgaaggctcttgggtgcataaggtagcactgccactattggagagcgctattgcagaactaccgttggagtgttggagcatgtatgtcccacgaagaccccgtatccccctggttcttgctaatttctggcagtcaaacagagtccgttgacccccagtatcaacctcgttatacagcccgcgatacatataaccgaaaaattgatctggttgtcggtcttcccgtgaatgcttacgaagttcaatatgaaaaggccgggttgcatacgacagggaaatacttcagccatatgacccatccgcatactggaaaacgtgttctgggtcctggtgttgaaattaaagccgcggatggaaatttggtggaagcgcaagtccagattggggtatggatgacaggacttctaatgtgggcattcgcacagcgtaagagtgtcaaagatttgcctccccttgttgggtgcactgctgttggagaagactggaaattttatattgcaaccggagtcgaagagtcgggtgtcttgaaagaagtagtaggtaatatgcttcagtgacttgggtacaatggctaatttcttctcctacagcgcatctggggccctttatctgacttagacggccgtaccacaagtgtgaaacataccacgtctcttttaggaactcttcgtcgagtcatggagtacacaatcgggcagtacaaggaagggattttccgagcaatcccttccgtggtttaaaagctacatggccattgcaaaaattcgtcaaataacgaatttcacgaatttttttatccccacgcctcgaatttgcttgatatctggaagatctgcaaagtataacgcatgcagcctgtgatgtcatactaaacgaacggggttctacgccattttgaagcatccgtcggcttcactcgttggaatttaatttcgggatggagtccaagtttgcgatactcgcgttttgtttgcttttgagccatggcttggctgaacaacgccatccccatgttggatctcttggcgatcttcgcgtattgcactacaacaacctcggtccccagaacaatggcacttcagctattttagcacacgatcgctcgagctatttcgatgctgttgcaaagtgcattgccataggggagaagctcttcccgtggtcttcgagtgaaagcaatagtcaaattcactccgaactcggttatgaactagactatctcatctttgcaaaagaaatacgagatgatgactacttttggctgtcggaggaagaaaatcgcaaattatgttctgctttctcgatcgcccatcgcaagatcatacagaaaccatgcaatgtgaagctaccagccctctgtacctcaagtccgcccggaacaaccgatcgcgaccgagccgtaagggaaaccacgaaactgaccgtcacatcccacgattataccctaaccggatatcgagatgcgcgttccttccgcttcctcggggtgcccttcgcgagtcccccaattaatgacttgcgctttgccccaccgcaagcctacaccggatcgaacaacatcgatgcgactagcatggggaattcatgcatccaatctgcttcagcccttagcactgtgtctattggtggaatgtctgaggactgcctttacttgaatgtcttcaccccattcctgcctcacaatatcaccaagaacaccgcccttcgccccgtggctgtttatctgtatgggggtgcattcacgaaaggtaccgcagctatgattgactatgacggaggaaacttcgccagccgcagcgatgtggtcgtcgtcacagttaactatcggcttggagcattggggtttttgtctacagggaagctgacaactgggagctacggtattcaagaccaaatcatggctttgcaatgggtacaaaagcacatttctgccttgggaggtgatccatcgcatgttactgtcttcgggcagtcatctggtggtcaaagcgtggtagctctgctctcttccagcgcagcgaaaggtctcttctccggcgcgctggtgcaatcagcaaacttcgacctgccatggtttcctcgcgctctttattctaaatacatcgctccagaagtcggaaacgcagttggatgtgacggaaacgccccagaagcaaccctcctcaactgccttcgttccgtcccggcttcaatgtatcttgataactcaactgatttccagactgctacaaagtccttctcatccaacaaggcaaatcacttctaccataatacagaactgctatccgcaagtgaaccgttcatgccgatggtagatgacaccggatcaggcgttatcgacgaccaatttaacatcctcctcgccaagaacaagctcccaatcaacgtcccgaccatgttcaccaatgtccgcgacgaagcaagcctctacatggccattttcggctcgacccagagcccactcgctacattgcttagcgttatattcggcgataccctcgctcggaaaataatatcctctggggcatacaaggttgatgattctgaccacgatgccgtcttaaacgctgcttccgatgcagtatcgcacagtcagtggacttgcccacagggctatcttctcgagaattccatttccatctttcctgtcctatacgaagtccaaatagcagatggtcatgcagagacatcaaatatgccgggcatctgttacccgaatactgcgtacaatgcttcctgccatacctcggatgtcttgctcgcgtggggtaccctgaacaccaagacggaagatgtgtatccgtactacgatgatttggatattcttcactcacagcttgttcatgatgtattcggtgcgtttttccgcgaaagaaacccaaatccggatctggagttcttgaagatccgtggtcctgcgtatgcaagtactctctctatatttggtggagagtcggttggttcgaactcttcgtttgggcgttctgagaagcggtttcttattgaggagtatacggcttcgacacgaaatatgacgcttttgggaatgccgccgtctactacggctaattttgaggacgaggagatttgtgctgtgctgcgcgattatggttttactttccagagggcgcggctgtcggattagattcacgttgaattcggtttgggttattaactaaatcgctacaatgaacgattcttgaacatttagtttcagatatatatgatgcacattcaagttcaagttcatattcgtgtgcgttgatctacttgagcttgtcattccatactcattcaaatggggagtatcataggtgcaattaagcgagaaaaaccacaagaaacaaaacgccaattaaagaagtccgccagacataagaatggaatgctaggttcgtcgtgaaaaagatgagtcgccaaaggcaaaatgttgtgatagagccgatgaaaaccaaatatccatatgcccgaaaatgaagaaaaaatgaaagagattcgttaaacatcaacgtgcagcaagtcgtgagaattattcgtaaatcggaaccctccgtgagggaatgtatccgtcatcttcaggaacagtggcaggaggatatcgctttgaaggggagctgcgagggctcgcccatccagttgtacggggatggaatccagcactgctgtatgatcgcggccgctcagacccgcttcctccgctactgggtcgactattacctgtacttccgccactgtaacttcctcttctcatatcatctgcggcgtgagtacctcgatgtctcggtactgctcttggcggaggagttggtggcctgtagaaaggtgggtctggagcagctggagcaggagttgagtcaccgaagatgaagtcgcggaatttgacacccgctgtgcgtgatcgagaacggtcctttgagtgttcctttcggcaatctctcggatccctatctcgatgatctctcgggtgaaacttcgatgaaggctcagagtgggatttactagatcgtgaagggtaagtctcatacccgcggcgatctctggtagggcttgtcggtgacagatctcggaatggcctgcgagtgtaggcttcgtgggagtgacgtctggcattactgctagaaggtggtgagagatgccgtcgggtttggtgcttattcggttccgcacggtccttgcggcggcgtgcagactcatctgaagacacatcagagacatttggaatatcacctgttcctgggcttagtggatggccgtgccgagcaccttggtctcgcccgcttgaatagggcggacgctccccccatgggggaggggatgaaactctcggggtcgaaaagcccggtcgactcgctctaggcctgcgtgtagaaaatgcgggatattctccactatatcgtcggcggtgattgcgatgatcggtgggtcgatcgggctccgcatgactgtggcgctttgacgccgcccggcctgaacgcgagaaatagtcgtcttcgtcgggcagaggatccttgccactgaaatggtaatgatacgtcccaaagtctggcggcgaagcacgcttcgtgtgtcttttcagatagtcacgctccaatcgccgactcacgccttcatgccattcaagcatctccgggtcgggctcggaaggaaacgcgtctcgagggattgtcttgggaaagatctcgccatttgcgtctacaatatcccaaaggctgactgcattctgcaaatacactgagtgttcatctgggtccatcaacagttgtattgtctgccaccgcacgaagccagtcggaagtagcgagggaatcgatgggggttcgtaagggttggctgagggttggagactgtggaaacatcctagtgactggtagatgaatgacagggcttgtgccttggtctcaaggaataaagggtcgtagttgccgccgaccttgcggtaaaaagtagcaagtcgatccggggtgatatcagtggtggcgttggtatcgaaggagcactttgggtgtgttattttggtatccaatccacttcagatgggtctagaacttaccatcaactgcgctatccctagacatagctgttctagcagcggggctgggcttttgtctgaattgatcagcgttccccagttaatatctgcaaaagccatgaatgtggggtatgagatattgagaagtgcatgcaagccgactcattaaagcatttcatctcacaggcttcgaggttgggcgcatgtcaagagagaggtgacagcgaagaggaagagagcggtcaggcacacacgggacccactgcggggaaccaaaggaatgcgaagtatggaagggatatgagtgaagtatatagaatacaaagaacaatgaagatacttaactattagaagatgtctgatatctccatgagttgcacggctgagaatacatgtgacttgatgtcacgatatccgtgactcatatacatacgctgcatgactgtgaagcctgatgtggcgctgtagatctgacccaatcaccaaaagatctcaattaagggacaataataccctacgctaaactactttaggtaaggtgtatctagatccattggattagacgaaattggttttgagctgagattttgagctgggattttgtgctatggacttgcggctaattatctgttgtaatccttcctggtaccctcgctaaacagtacttgactatcatgacatgaaaggctttaatgaccacgatgtaggccttcccaaggagcccatgacaatgaaccaccgttgttgcgaccatctccttgccttctctattattgtccttatagcccgttggaaaatgctgatcgcgtgtcagaattgaaatctgaaagttgagatgactgtcagcctctcccaagacaatctcgttctccgcgcgcgagatgacaggaaatactgtaatagtatcgatgccttttttctcggccgctgccagtatctccgtggagcgcttcacaccaaagattgacataactccatctctaatccgcatcaggactgaaaaccagacaggttgtctcgcaaagaaaagcccgcgcaagggcatctgggctgtattctccagacttgggtactggaagggacacagcaaatgcgtcaacaaaataagctgatttatatgacgatggcaacctgctttcacttggaaaggagacggcacgaacgggtgctggtagcatttttccttgcgctgagctagtgtgtaaagaagacgagattgggatataaagaagcgagtgagagcgcggtcgagtttgtgctatggcgacgcgaagctttgtttgaccaacaagccgtggaaatgaaagcattaagttatgtggcttatgtatcaacatggctatgaagacgatcgaagggatgacaaccgttttatcgagggtatgatccgtctagtagtctccgagggtacccgaatagttgcccgtaaacatccgtattgaagaggggaccctgccacggggacaggggcaccgacagccctgcctgcaaaacaggtgtgagagcagagtattcactgggagtattaggttgctagagaggagaacaccatggggtgactaccgagaagagaggtggaaaggtgtctgcgttgctatctatgcctcgggagtgcttttatatcacatagccgcttagtcatcctgctctgggaacccccactgcaatataaagtgcaggtacctgattggcccaaggggccatatgaaaaaatcaatagacattgggacgaggtgtcaaggcctaagcgggacgaaaaggcatacacacgagtaactagtcaggggcagacatcttagtatcttcaaaactgcagtgggggtttccagagtaggatgactaatcggccatgtgatatgaaagcacctccgaggcatagatagcaatgcagacactagacaccagacaccagacaccttcacttcccagtagtcaccccatgatgttctcctctctagcaccctactactcccagtgaatactctgctctcacacctgttttgcaggcagggctgtcggtgcctctcaggggtcccctcttcaatatgtaaattaataaaaagtatgctaagtcctctttctgtagaacttgctgaaaataattgatatctcagaccccgtttctgtaactttcattgcaatttcagacaaatatagtaaactaaggagaggtcattcagtctaaactcccgaactgatgcccaaatctctataaaatgccctcaaatcgggttgtcgaccaaggaattctgccattgtcgtgttctcattttgactgcctcctttttctagagccaagtgcctgaatcgtctcattggggtgtgattcaatggatttgtttggaaataggattgaaatatatcgaccgaataaattcgcgagctggaaagtgttaatatgagcaaaatcatagacttgaaagccagcgagaccaaatatcttactatatgtatccgtaatacctagcatcatagcctgagacaagatgaccgaagtttgcgtatccatgcccccagtcatccttttcatcgcgcacacaggagctattcaaaccaacgacttggcgctggaggcgattgtacagctttgagatggaggtggtgttaagggcttctgaatcgccgatttgatgcactgccatgtcaaaggttgcgaaatggatttgttgcaaggttgagaggacgcgatgtgatctttttgcgttaatgaaattttggagcaatgagaatggagatatcgatgatgtagaggtattgacattgttattatgcgtaggtcgggtggtggaaggagacaaaagagaaggcgagctgatagaatgcagtatggactcttcccaacaccagctttcgagtaataggctagggatctcgacaaagtccctcgccaccctagtgccatggaaacgagagaacgtggtttttgacaccaagttgtgaacagcatgtccaaattcatggaatagagcaatcagatcatcgaattgtagattggcttggttgctgatggtaggtcttgcaaaattactgaggattgcagtaacaggataccacctggttccgtttgcgaaagtgaagccaggctggaggagaaagttggcgacacgaccaccgaactttcctgccctcgaaaagagatctagatagagataacccagaaagggctctgtacagttgactgcgtcactgtcatcccaaactgcgaataatcggacgtcctcatgccagacaatcccattccgatctttcgactcggttatcccttcaaatctgattccgaatagccttgctaccatctgcataacacgccgtagaacatgttctaaagggaagtacgccgataccagtgcgtcaatattggtgtgagcatctttgttcgcttgcaagcggctgtagaagtggtggtcccataactgataagagtcactaaaggtctctgacatttcctccagatgaatccgtttgacctccttcaaaaaggcaatctcttcctgtccggcagcattgagatcttgcttcagggcccagagcaatttatccacatcgcggaacgatctcaccatattgcctaccaaggcaccgtctgcatgattctgaaatcctgctatcctggccgcatcattgcgtaaattgacaatttctgcaaatattgccgcattctcgtgattcttgttctcatttgccacgtacaccctctcccgtgtgtgtgatcccgtcgcagatcgcagcacaagcgagacctccgctcgtcccaagggtatcttgaacaaattatcacctttagaatccgattccaacttccagatggaaagccactcatccgatacaccttccagctctgctctgctaaattccagcgtcggtggtggatgcttcagattctcctcatacgcatattggagttcgctgagccgtgtctgaatttggttatattttgtctgttctgatgggttcagatgaagaccatgttgtcgaaaacatctcaaccgatcatcaagaaaatgctgctgctctgggaggagggtctgtcccctttgcgctacagcggagacgagtctgaagatgccgctatgttggcaagattgcctttcgaagctctctatcatcttcatggactcaatagaagcgttgtgcacatatgtgttgctcgtcacggacttatagaatccaacaatatggtatctgagtccgcacagattttcaaggtttgctatgggcagcaagacgttctcgaacgtggctttcgtttcattgacatcttgttcaagggaattatataattctctgctcgtctcaatacaatattgaatgtcttccatgatggatgatggggttcctagaaaggaaggtggcgcctgtggcggcctgcattgcacatttgctgacggctcatggaatggagtggaattcttggaatcggatattgcttcacctgcagacgctttggcaagttcggatgatagggttgaaaattcttcggcccaaatatagaatagagcggtggttagaaatattatgccgccgaagaagatgaacgagacgcgaagcggcggagccattagactgagttgtgaacgacaagaagatatggttcatggcaaataggaatgaatataggggtcttcatttgattgtgagcatctgtgttcaaatgttttgcttagactgtcacatcataggctcccgaggtcgggccagactaatgcatgattacatccttagtgccccatagggtaatcaaccttggaagttgcatgaatgattacccgtaatcaagtaacaccagttgacggaaatatatagtacgacaaatgtaaggctaccttcggtggtgactaagtaaaactaacgggttgacgaattgtagcgcgtagggtcgttttggcctaattgaggctcgaagaaaagtaaggatttctgaattaccattgcagagagcttaataatccgccagccttaactaactagattggcaaaatggagcttttggcgccatagaagttcacacatcactactttttggggtggtaatatatgaatctttcatgttcatggggtcatcgggcctggtattgttacgagccaattcgattcagaagaaaaaagtgcaattcaaaccaaattctaagtacgaagaagaaaggaaaaagagaaactatctgagtgcgcgttctccccttcttatactcttgcgtttgtctcgtttaattcctgtttgtcagtttgggaaggtacgagggcgtggtcgttccttcctcgtttggcaagtacgatccttcccagatcgtcacagttattccgtcccggcaagggtgtaaaccgatgcccaaaagcggtctaaattgaggccaaaaatcaggcattaaggcctcatttaggccaaaacgaccctatgggatagttgactaactaactagttaactagttacccgccatcctatctactagtttgtcatccaaggactagtttcaagttagtcaagtctacatcgtaactagttgactttaaaaaaaggaataattttcgcataaggcaaagcacgaagagactgaaagcaaccagattgaaatttcaagaaagtagaaaaaagtaaaaggtactggggtaaccaaatttaccctacgcttgctccacaagaagggttgtagagatgtaagatctcaaggaaagaacgcctgcagtccgagcatccaagtatatcttccggtccaagtatgccagaatctggtcaatcgcccaaaaaatgaacaagctagtcgatatgtaggtctcaacagcatcacatcgggtgatcgattcaccaagatccgtaagcaactgagaaaatgaccgaagctcgtccctcggttcagaaatttggtagggatactgttcagctgcttcttgtagatgccccgcaactagaaccgcacagtttttcaagacggatggcctcatgatgtccaatggcgtaaattcatagcctacaacatcaagaaaccatttctcaaggcgattatatatggtatcccgcgtgagacaaaatatgtgcttgcgagcaggcttccggatttcttcccggccgtcttgatagagcttcaggtctaaaagcccatgtttatcgtatgacatgacgttcgtcagtcgattcagcaggcatgatttttccatccgattttgatcagaagtcaagaaacaaccccgatcaaacttgacggaggtggttgagggcgcgctgataacagcctgtttccatcggccaaatgcttcgccgctgagagtgagcctcgatgcatccagcaatttggacatgtgaccatgactagaaatctctaggatttttttctgaatcacggaggcctctctcgcgagtactgccacaaattcggaattggaattattctcccaacgacctaagatcatatcgaatatagaactttgccgacctgcgtctccttcttggacggggagcaaggaaccgggactgtcggatatgagatgaaacgccgcaataatgcaactgcgagcgctcccatacttagtccgatagcgatggtgaaccaaagaaccagcactgaatgcaaccgttatcggctggtctgggtattgtacttcaacaacacatgggctttgattgtatacgcgcttctgaaacccaaagacgttttccaaggaagtttctgtcaagaatacactgtcgttttctgtcgaccaaggtctaccgacttcatctaggcggatgcggcgattgccgagatgtgtcccgggaatataagtgaagttctggcccgtcgggcctctgggaactccctttttccacccgacaagaaccttgaactcatgtcggaatggagtgttgtcaatgtgaagcatgttgtcttgggcattgactgagattggttgggtgtcttttcctcgcacatcagtcattctgatcgcaccgcccatcgtatatgcaatcagagcaaccaaaagtgggtgaatgaacgcgtcattatagatcttgttcttcaaaaagcttggatgttgggagagattgaggaacgaatgtaagaacgcctcactgccggatgtcgccatcgcttgcgtgtagtccccaatcaaggtagtgaatcgtgctttgtcaatgagaccagcaaatacagcacatccctcggttttcagaacctcaactagctttagaaaggcactggtagtgcgggggtcgtcccaggcaccagacaactcgtggatgagtttctgtcggaaagcttcattttcttcctcgttgtggtgctttctgtacttgtttgtttcgaggctcacagcaggactaggtggcgcctgggcaagatgctgagcaactagattttgagggtcgatactaggtttgatttgaaaatgcagaggaaaggtgttgtcgtgtgtggtaccgtttgtagtctcatcaaacactccagttgtcgattggtgataaccatatgggtgttggtgcttccaagttgcctccatgatgaaaacgaatgagatagtgtttgtttgtgaactttggctagttggagattccgcctcttctgtccgtatatgtaagtgcttctcgtcatgtaaaaccgtaataaacacgtgggtgtaagctgattactcggtggagagacagtcagctcccgagattgttacctgcatagatgattatcaggtaatcaaagtaagcagaaaaaaaagtgctgccatgacgatatgatcgcataacgtgatttgagtctgacaatgcatctttttatatcattaagttttctataggaacttgaacccgcttaggagaattctacgccctgacataatcggtttttccacctgttcctttacaatatgttctcgaatcaagaatatgttcagttgagaatggagataccagcagaagactgtgatcaagacgacaaatgttcggtcacccggcacagaatactcagggactggtggaagattctcattctggtcacagcaacttctagcctgatttcatttggttctttctctctcctcggataccatatgggaaaagcctccaggtccaatgattggcaacatctctccaacattcaatgtggcaccacgttatctgaagctcaagagctaggatgcgagtttgacctcgtcaccaacaactggatgccaaagcaatgcgcggatcccgatacaaccagagagtttcgcgagtgggtggctaacaatgcacgccttcaccagtcgtggccttactaccttgatggcaaaggagaaaggcaaatcgcctcagaagaagatatgtccaaaatgatcggccagcgactatacacaaccacggagaaccacttgggacattgcacttttctcatgcgccgattgcaccgcttcataaacaacggtgccagtattatatcgcaaatcaacctaaatcatacgattcactgttcctctgcaattttgcaggcgattggtagtcctgattgtgatgatcgtggcaagattacatcgggattcgatgtgggcattggtggatgttagagtgtgcagcatatgggatccacattgcgaatgtattctgtgaaggatgctatccttctatcacaggaatccgtagctgagctggtaatggtacgcaagcttatcatgcatagttattattattctctttttcggggccaaggctgaaacaatgatctccatgtatgtaattcaaagacataaatatttaatccgagtgattaccaccgaggtcaggatccagaattccctcactaaatccatggagttcctcgggcctcccgtctgccatccacactgtagtgtctactcccggtctcaattctttccgcagggtgttgagtctgtgagaaatagcgatggtggtgtgcccttgattcgtaaaataatctctcaacatttcctgcatcttgatatccgtttcgaggtccaaagatgagctggcttcatccaggaggacgattggctttcgttggctaatcacggggtcaggattctgagttgatgactggacccttagtaacgcctgtgtgaaggcgagcatctgcatttggcccgtagaaacgggcgcaaaactagccagcggttggtcgaggaaccctgggtttgtggtatccagaacaatcccgttcgttgtccttcccaggaaggtgtctcggagctctgaacgagatgcctttgaccaaagtccagtctttgaaagcatctcgagaatggtatcatcttgatgttgattgtagggatcgagattgaatcgaaggcttgcgtcgggaagtatgaaagggtcctgaggtaaagcaacaaagcagcgtcgccgtacaacatgtactggcaagcgggtgatatccacgccatcaacctcaattgttccagtctggggccttaataactgcagcagcgtaagaaggagactgcttttcccactgcgaccagtgattaaaaatttccagtcagcttcgaaaaaggagagtgatcaagagcttatcgcgacaactttaaagtaccttccagttcgaccacacagaatgacacctgacccaccccgaatgtccatattcacctcacgaaggacgggcacatgggaactgcaaagaatcttgtcagtcttcggtctgctatgtccttgtaagtgagactaactcatagcctgctgataggtctttgattttcacggaacccatacttggccactcgggagagggctctaagcagtcccagccttcatcttcagaaagggtgccatgatcaacagatcgtagccgtgacactgcgccaagggaagtctcgagtgttgtccaattttcaaccaagcgaagcaatgtcgtgtttgcagcaataatcatgttcagcgcaatacccatgtcagcacctgtaactgtattccgaaacctcactgctgaagcaattaaaaccacggcaactcctgagattaacaaatctaaaaccacattcaaccacctctgtagacaaaggagcagatacaacggcctctgtgagatgtctagtttctcgatgttgttgatcgcaaatctttcttcccatccaaatgcacgaattgtagcaattccttcaatctggtcaggaattagcactagtcagagtagggcccggtatcttctgcgtactgtctctagaaaacttgtatagagttttgctcttgactctaggtcaatgaaacgcagttgtcgagaggttctcaaatagttgaatcaagtatacacaaatagtgcagagcggtaaagtcattgctatggtgggctgagccacaaataggacgatagactgcatgataagcttgaagatctctggcacctcatgtttagcatgagaaagtggctggcacatgtggtactggacatacggttgctgagatttgcgaaggctgaaggcatttccttgtcgaccaattgaatatcttgaccgaatctggagtatttgcaatttagtaaatctgccatcgtatgaaattaatttgccagacctattcaatatggtaccaatatcaaaggtcgaaaagtatgaaagaggtgcactattccaatatcagtgaattgctgaggaggctatttttgaaacatacttcattatctttccgaggagtcgagaatgcagagtagaaccagatcgtggagcgatgactatatgtgttgacctttaaatccggttcagtcagacagctggattgacagaagagaggtagacaaaccacatggtcccgttggtcgctatccaagccattagggatagtaagaaataaatcagaatatacaacgttgagtttgcattgtcggattcagtccaccacttgagaatgtactgtgcgaaagtaagacagaatgcatatatcgcagtgcaggttgccatgagcaacatgtttgaaatgccggctgcatcaaaataatagccttaattttgcgtcagatattttcagcgtaggactagaggtagaacttaccgtagaccgccaaatccccggttctccttaatttatcggcagcggcatcatctatctgtgttccgtctctctgtgattttaccgcaatttctgatttatcagcctctgatgtacgttgtagaacatggctcgtcctcatctctggctttgtctgaagggtaaaatcagaggagctctggacttgtactttcccttcattgagcaaaattatcgtatcggccaggtggtagtactgagctaagccatgtcagaaggataagtcacggacaatgaaaggggccgaacgcactgccatgggtgatgagaaagacagtgcttttcattttgcgcaaaagcccttcagggccaagcaaggcattgacaatttggttctccactgccgcatcgatcgcactgaacgggtcatctaagatcatagtacgacaacgagaatacaccgcacgagcaagagcctccaataaccttcttagtggtttgatcactggatggtctgaagaagccagaacttacaatgcgagatttttgccccccagaaacattaataccaccacttccgacccacgtcatatctccgtcgaccagcgattctaaatcggcaacgagacggcaggcttggatgacagtctggtaccagtccgcatcaaatttgcttgattgtccgcaaatgacatcccgtatggaggcaatgggaagccaggcagaagggctgcagaatgcgatactatcatccgaaacagtaatcttaccctccgtgggattgatttctcccagaattgtcaatgccagggctgactttccactgccaataggtcctgagcatatggcaattgaaccttcggtcatttgaaagttgacattccgtagaactgaatgtgagctagagcgttggacggtgacattttccaatgtaaatgccagttgaggaccaggttgtggtttgtcttttggcctggaggtgaacacacgctcatcttttaatgatccctgggtcaagtagctttgtattctttcgaagtttgccaaagatgcaatcacacgaggtactatcgtcatgaccatattggctgggtgagtgactagacctaggagagcgatcgaggtgaagacaatatccgcatttggggcatcattttcactgcgagaaactgcaaacagcaccaaagtcagaaccggggagaatattcctagcgcattagctaaagagatggacgaatagtcagcttcaatatattggctagagatttcgtggccatgaacacctaggaataacagagtcgaaaagaattgttggtcttaccgctggcgttgtatgctaccataatccatcgcaatcttatcgacttcgcaatctctcgagctcttaaattggagacaaggaagctagtggcctgatcgagacctagaatcttcatacttttgataccccggaggaccgaggcaagcattgaaaggcgatcctgagttgcaacactccaatccttttgttttgcctgaagatgttttgcgacatatgcgctcatttgtgaacaccctagagttagttagcgtttgtctggatcactggtgtctggtgtgtgactatatcataccaaatataatcagcaggggtagtagtgcaaaccatccaagttgtcttccaaggagcgcggttccgaccaatacttccacgacttgcgcccaagtctcatggagcatttctgcagaagtgtcaaggctgtcaacatctgcactcataagtgttaaggcatttccgtcatgtataggagagcttgcggccctaagtgacctagcatgaagaaggctaataagagccccacgcgccataatctgcagtcggttgagcttgtgtcgatataccgatgtggaaatctatataatctcgttagatatcatgattcgaagtggctccttagaagacctactgctagaccgcaatatatgatagtggttagcacgataagccaatatcccgaatcagtgctctcgtgttgaggaccgtcaatccgcacaaaagtcatagcaatcttaatcagagtcggctgtgagtaccgaaaaactatcaagaataaacgcggtataataggcgacaggcactctgcccggaaacaaccaaagagaacacgtggtaaggtgaacctgttctctggttttactggacaaagcgttaatgacctcattattccaacattgtggtaggcgatacttacatctctgtgtccaagcccgtatcacccgttcccttaatatcgcagaggagagagcttggtcggccttgggtaagtcatcttgtgttaggatcttacagtaaccctccttgatgataggattgatccaccaaaacagcgcacgaccaagagctcccgtagcttcctcgggcgcgacatgcttatagtgaggctgtaagattgagagtttatttggaaactccactaccagtaggctcaactccagcgccaatcttatgctcacgaggatgagccccgcagttccaagatcccccgacggtaaggtcaggacaataaaatcattgatgagatataagcccacgtatagagtgaccggactagatggccgcacagtcctgcggtgctcaaagaatgacaatataaaaagctcgaaagtagcgaaggttgatgcgaataatggagcctgggaattgaaatcatctgagaggtttgttatttcgatgagggaaatgatttgggtaatggtaagccccaggactaggatctattgactccaggcagatgcattagcaaatccgaagaaatttttgtagaaagaagaagtgatatctgactgttttgatatgaccatggagattaggaaccactttggtaactgcaccgcgtagattccacagtttgaaagacgcgtagagcacgaaggtcactgataccaacaatgagtacagattgagccagacagacatggtttcgaggaactatgttgcgtgtaagatcgatttcagtggattgcagagttgtgagtttatgtttcttcgacacataattagagcttctcttgtcaccgccatttttttgtcttacagaggattgtaatcgtggcttctgagctaggccgcatgattacgcgctagataaattactcggtcccacaaagtacaaagagacccctgctaagatgacgcaatatcgggcgttaatttgtagttggagccttggaatgtgcattttccaggtacatagatgtttcccaccattgcgaagggtatagcggccaggggtcggatgcaatgttttattatgcgttgatgcctgaagtaggccttatttttaactccctttacaccgctctatacagtactgtaaatgaagctattcatactatacaaattcctgtcttcaccgaatttcaggcagtgagagcaacgcagacaccttccacttctcttcttggtagtcaccctatggtgttctcctctctagcaccctactactcccagtgacgactctgatttcacacctgtttcggaggcagggctatcggtgcccttgttgtcctcgttgcagggtcccctcttcactatgtagatttgctcagttgaggggggtctatagcatgttcaaaaagtttttgacatctcataatgattctgaaatgaagtgttagaataaaagcacgacgctctataattagcgcctcaatgtgacaattcattcatgtgtatcccgtacacttgaattcattcctcggctattctacattatggaacaaatattacttgtggccaagatcatttcttacaacgtctgctttgtattatttatcaaataccccagcgaagttctcgctaatgtatcgcaaggcgtccgcacgataagtatcctgaatagtcaacccaacgtttacttcgtcgaataccaatgtgtccctgttcactgactcatacttaggccaattataaacaccttgctttaatcccgcatttggatctaaagtcgtgataaagccagcccacatcgtacccatcaagctcgacatttcgtagtaaccaggcccctttccatggaatgaattcccgtcaaaccccagtccatcaagattctgaaaaataggggcaatctcagcaccatgaggaacgcctacccgagagtcacgctgccaggctggtgtcgcattgaagataaagttaaaacaagtggcagaagttgagaaactctcgcaaaccagccgttgcgctgcgttcatttcgatgtctccaataactgttttcactctttcaaaagtatccttgtcggaaatagagcctatgggaggttctagagtctctgcgacgccactttccgggtaatagcttaaaagtctttcgctgactgagctggggtagccgctatcttctgccagtggccgttggattagagttgaattcaaactgggatataagaattcaagaaactggtcgaaatattgatcgaaaaaaagaaagagacttctgtgatacataccagttaaaaagatggccaagtctttccatgtggatatttgaggcgggatccatgttgcggcttcactggagacaattccactgaggatgggaactggtacatatcgtctctctgttattgctaagctcccatatccttcaacaaagtttccatctagagttggaatggcaaaactggccatcatctggctgttagcctgtgcagagtcattgaaggctgcatctatatcattgagtggaatatgccttaagcattccaaagaattctccacgtctttgcaattggaggccactgagagcctctgatacatttcttccggggtgaacgatgaataagatgtcttcacaattggacctccactttgcataatggctgctcggaacaagccatcatcgcgtccaccgtatgcagtgagatggaggccaacagagtcagcaccggagctgcctccccagattgtcacccgacttttgtctcctccaaaagcttcgatattttcttgaacccagtgcagggctaatctttggtcgtgtaatcccagatttgtgttacgggtacctttgatttggtccccagagatgaacccccatatcgatgaccgatagttgaatgaaactccaataaacgaaagattctcctcggccgcatgtgatatcaagtatgacaaattatacctgccgtcgcctgatcctcccccatggcgccctcccccgtatataaatacaccaacaggcaaaagcccttgcttatagctcgaagggcggacaacgttcaatgtgagacaatcttccgatttcttgaattgttcttggtggtcctacgttgtgaataatgtcagatatgaagaacgcgtgtcggatgtgactcactccgtatccaatgcaatgaggcccatattcaagtgcaggttgaatatgattccacgagacgttgatagaacgaggataatggaatcgcaggtctccgataggtgcctgagcataaggcataccaagaaaaatatcttgatcaaaccgaaagttgtgggttcccgcaaaagtcccattccgggtttttgcaagaggctcatggtggggattttccctatgagtgtcgaagaattcggggacaaaccacaaagccgacgctaggactaccagaaaaagaagagatacagatattgaaatcctttgttgacaaatgtggttttttcgcctttcgggggcctgcatggcgctgcgttccgattctaatggcccgtattcaatcatttcgcatgggtttcgagggtaacagaggaaatatccagtctaccgttgtcaacgagcaagagccaaggatttccaagagtattctagcatgagatgggtgcttattttgtgtctcatgcttgtgacttaatcaagccaagggtaagcaaggcgagaagtggacgccaagcctggcgattacattcgaactgaccaggacccacagtaatcatctttcctatttgggggatatttgacattctttggtgtagtaaatcattcaaaagccacggcacggtcgttggtagctctcactaatgccaccatcgattaaaaatctcccctttttataaaaaatgatcaacatcagaataccaatgctcatgacatcatcgtgggagaggcaaggatcagtgattcgggtttcgtaggtaaccgaaatgtgtcattgaaaatatatctaatgtttgaatgaatagcatgtggctatttctgagtgtatccgttgtgctatcgaacaagtggctagtaaccgatatgaactttagtaaggcaaatccatctagtcccgacttttaatgacaaataattgaccagaatttccagcatatcgtaagattgctttatactatttcatgttttgtgtcaatactaagatcatgatacagcggcattcctagctacctcccatatgctatttggcaccatagcgataagtgtcttgaatggtttgaggccgacgtcttcgcttgttgtcactgatatgacattgcgcaaatacgcatcaatcatcatccccgtggcagtggcattgaacacgagcatcatctgtggcaatgaagccgttgcttatattagcattacaatgattcaaattctcaaggggctttcacctgtcacagtctatatgatgtctttgtttcttggtattacccaattcagcagaatgatcaccactacactgcttcttatctcgcttggaatttttcttgcatcttttcagtctgtccaaacagatctttacggcatctcagcgcaattaattggaattgtctctgactcatcccgacttgtactaatgcaaaaaatattcacctcgcacccattcacatttgacccaccaaccttattctatcacctcgcaccattttgtgcactcttaggggctatcatcacagcctttacctcatttccaactactttggagcttcagaatgtatgggcaatgctactcctaaattgcacccttacctcgatgctgaacctggctggactttttgttgtaagtaagatcatctttcggtacaggatgtggctgatgtttgctcagatacagaagacttcgtctctcaccctcagtctctgcggcatctcgaaagatatctttctcataacagcgaccacactgatttggaaaaccgaaatcaaaactttagagatcataggttacatgatggcaataataggcctggttttataccagaagtgcagtagctagccagcagtcgaagacagctcattacgataggaataaatttgttcatttttttcctgtattttagattattggttttcaacagagttgttccgaaggccctgtgcctaactaacgtaatcggtaaacgagtgggccatgtaaacgagtggcgtgacatgtgaaatgtaaatagacatcggcaaagcccagcatgggcccaagatttcagcnntnnag
